(19) United States
(12) Patent Application Publication
(10) Pub. No.: US 2014/0287937 A1
(43) Pub. Date: Sep. 25, 2014

(54) METHODS FOR ASSESSING CANCER

(71) Applicant: TOMA Biosciences, Inc., Foster City, CA (US)

(72) Inventors: Austin So, Pleasanton, CA (US); Michael Y. LUCERO, South San Francisco, CA (US)

(73) Assignee: TOMA Biosciences, Inc., Foster City, CA (US)

(21) Appl. No.: 14/187,041

(22) Filed: Feb. 21, 2014

Related U.S. Application Data
(60) Provisional application No. 61/767,718, filed on Feb. 21, 2013.
(60) Provisional application No. 61/769,683, filed on Feb. 26, 2013.
(60) Provisional application No. 61/777,702, filed on Mar. 12, 2013.
(60) Provisional application No. 61/780,578, filed on Mar. 13, 2013.

(51) Int. Cl. C12Q 1/68

(52) U.S. Cl. CPC C12Q 1/6827; C12Q 1/6874
USPC 506/7; 435/6.12; 435/6.11

(57) ABSTRACT

Provided herein are methods for assessing cancer, comprising analysis of sequence data from a set of cancer-related genes in a tumor sample from a subject, followed by monitoring of a subset of the set in circulating tumor-associated DNA in a fluid sample from the subject. Also provided are kits and systems for practicing any of them methods of the invention.

### CROSS-REFERENCE

[0001] This application claims the benefit of U.S. Provisional Application No. 61/767,718 filed Feb. 21, 2013, U.S. Provisional Application No. 61/769,683, filed Feb. 26, 2013, U.S. Provisional Application No. 61/777,702, filed Mar. 12, 2013, and U.S. Provisional Application No. 61/780,578, filed Mar. 13, 2013, which applications are incorporated herein by reference.

### BACKGROUND OF THE INVENTION

[0002] Cancer poses serious challenges for modern medicine. In 2007, it has been estimated that cancer caused about 13% of all human deaths worldwide (7.9 million). Cancer encompasses a broad group of various diseases, generally involving unregulated cell growth. In cancer, cells can divide and grow uncontrollably, can form malignant tumors, and can invade nearby parts of the body. Cancer can also spread to more distant parts of the body, for example, via the lymphatic system or bloodstream. There are over 200 different known cancers that afflict humans. Many cancers are associated with mutations, for example, mutations in cancer-related genes. The mutational status of a cancer can vary widely from one individual subject to another, and even from one tumor cell to another tumor cell in the same subject. Knowledge of these mutations can aid in the selection of cancer therapy, and can also aid in informing disease prognosis and/or disease status. A tumor biopsy can be sequenced to provide information on mutational status of cancer-related genes; however, procedures for tumor biopsies can be surgically invasive and costly to a patient. Furthermore, reliance on a tumor biopsy is of limited utility for monitoring cancer status of a subject if the subject has tumor cells that are difficult to biopsy (e.g., if a tumor is small).

[0003] The discovery that cell-free DNA floating in blood plasma and serum can harbor tumor-associated mutations opened up the possibility that analysis of cell-free DNA could aid in cancer diagnosis. However, analysis of cell-free tumor DNA, as currently practiced utilizes untargeted sequencing or complicated PCR amplification (e.g., on magnetic beads), resulting in high costs due to expensive reagents and systems.

[0004] The detection and/or measurement of mutations is widely practiced in the life sciences. For example, mutations such as single nucleotide polymorphisms (SNPs) are associated with a number of diseases, including, e.g., cancer, neurodegenerative diseases, infectious diseases, autoimmune diseases, anemia, and cystic fibrosis. Current methods for detecting mutations generally involve the amplification of target polynucleotides. For example, target-specific primers can selectively amplify regions suspected of harboring a mutation, and the resulting amplicons can be sequenced to interrogate the mutation. By way of other example, assays may utilize intercalating dyes that fluoresce in the presence of double stranded DNA (dsDNA), or may utilize Taqman probes designed to hybridize specifically to a particular polynucleotide sequence. These assays generally suffer from poor specificity and/or sensitivity, particularly for mutations affecting small nucleotide sequences (e.g., SNPs or small insertions/deletions).

### SUMMARY OF THE INVENTION

[0005] Aspects of the invention relate to methods and kits for assessing cancer. Other aspects of this invention relate to methods and kits for preparing a sample library for sequencing.

[0006] In some instances, the invention provides a method of assessing cancer, comprising: (a) determining the presence, absence, and/or amount of each of a subset of genes in a sample derived from a sample from a subject, wherein the subset is determined by (i) performing targeted sequencing on a set of genes on a solid tissue sample from the subject wherein the solid tissue sample is known or suspected of comprising cancerous tissue; (ii) determining a profile of genetic abnormalities for the set of genes based on the sequencing; and (iii) selecting a subset of 2, 3, or 4 genes of the set of genes based on the profile for the set, wherein the subset is specific to the individual; and (b) from the results of step (a) determining the status of the cancer in the subject.

[0007] The method can comprise (a) determining the presence, absence, and/or amount of each of a subset of genes in a sample derived from a fluid sample in a subject, wherein the subset is determined by (i) performing targeted sequencing on a set of genes from an unfixed solid tissue sample from the subject wherein the solid tissue sample is known or suspected of comprising cancerous tissue; (ii) determining a profile of genetic abnormalities for the set of genes based on the sequencing; and (iii) selecting a subset of the set of genes based on the profile for the set, wherein the subset is specific to the individual; and (b) from the results of step (a) determining the status of the cancer in the subject.

[0008] In a related embodiment, the method comprises (a) determining the presence, absence, and/or amount of each of a subset of genes in a sample derived from a fluid sample in a subject, wherein the subset is determined by (i) performing targeted sequencing on a set of genes from a bodily fluid sample from the subject wherein the bodily fluid sample is known or suspected of comprising tumor-derived nucleic acid; (ii) determining a profile of genetic abnormalities for the set of genes based on the sequencing; and (iii) selecting a subset of the set of genes based on the profile for the set, wherein the subset is specific to the individual; and (b) from the results of step (a) determining the status of the cancer in the subject.

[0009] In practicing any of the methods described herein, the set of genes comprises at least 10, 20, 30, 40, 50, 60, 70, 80, 90, 100, 150, 200, 300, 400, 500, 600, 700, 800, 900, or 1000 genes.

[0010] The set of genes can be selected from the group consisting of: ABCA1, BRAF, CHD5, EP300, FLT1, ITPA, MYC, P1K3R1, SKP2, TP53, ABCA7, BRCA1, CHEK1, EPHA3, FLT3, JAK1, MYCL1, PIK3R2, SLC19A1, TP73, ABCB1, BRCA2, CHEK2, EPHA5, FLT4, JAK2, MYCN, PKHD1, SLC1A6, TPM3, ABCC2, BRIP1, CLTC, EPHA6, FN1, JAK3, MYH2, PLCB1, SLC22A2, TPMT, ABCC3, BUB1B, COL1A1, EPHA7, FOS, JUN, MYH9, PLCG1, SLCO1B3, TPO, ABCC4, Clorf144, COPS5, EPHA8, FOXO1, KBTBD11, NAV3, PLCG2, SMAD2, TPR, ABCG2, CABLES1, CREB1, EPHB1, FOXO3, KDM6A, NBN, PML, SMAD3, TR10, ABL1, CACNA2D1, CREBBP, EPHB4, FOXP4, KDR, NCOA2, PMS2, SMAD4, TRRAP, ABL2, CAMKV, CRKL, EPHB6, GAB1, KIT, NEK11, PPARG, SMARCA4, TSC1, ACVR1B, CARD11, CRLF2, EPO, GATA1, KLF6, NF1, PPARGC1A, SMARCB1, TSC2, ACVR2A, CARM1, CSF1R, ERBB2, GLI1, KLHDC4, NF2, PPP1R3A, SMO, TTK, ADCY9, CAV1, CSMD3, ERBB3, GLI3, KRAS, NKX2-1, PPP2R1A, SOCS1, TYK2, AGAP2, CBFA2T3, CSNK1G2, ERBB4, GNA11, LMO2, NOS2, PPP2R1B, SOD2, TYMS, AKT1, CBL, CTNNA1, ERCC1, GNAQ, LRP1B, NOS3, PRKAA2, SOS1, UGT1A1, AKT2, CCND1, CTNNA2, ERCC2, GNAS, LRP2, NOTCH1, PRKCA, SOX10, UMPS, AKT3, CCND2, CTNNB1, ERCC3, GPR124, LRP6, NOTCH2, PRKCZ, SOX2, USP9X, ALK, CCND3, CYFIP1, ERCC4, GPR133, LTK, NOTCH3, PRKDC, SP1, VEGF, ANAPC5, CCNE1, CYLD, ERCC5, GRB2, MAN1B1, NPM1, PTCH1, SPRY2, VEGFA, APC, CD40LG, CYP19A1, ERCC6, GSK3B, MAP2K1, NQO1, PTCH2, SRC, VHL, APC2, CD44, CYP1B1, ERG, GSTP1, MAP2K2, NR3Cl, PTEN, ST6GAL2, WRN, AR, CD79A, CYP2C19, ERN2, GUCY1A2, MAP2K4, NRAS, PTGS2, STAT1, WT1, ARAF, CD79B, CYP2C8, ESR1, HDAC1, MAP2K7, NRP2, PTPN11, STAT3, XPA, ARFRP1, CDC42, CYP2D6, ESR2, HDAC2, MAP3K1, NTRK1, PTPRB, STK11, XPC, ARID1A, CDC42BPB, CYP3A4, ETV4, HGF, MAPK1, NTRK2, PTPRD, SUFU, ZFY, ATM, CDC73, CYP3A5, EWSR1, HIF1A, MAPK3, NTRK3, RAD50, SULT1A1, ZNF521, ATP5A1, CDH1, DACH2, EXT1, HM13, MAPK8, OMA1, RAD51, SUZ12, ATR, CDH10, DCC, EZH2, HMGA1, MARK3, OR10R2, RAFT, TAF1, AURKA, CDH2, DCLK3, FANCA, HNF1A, MCL1, PAK3, RARA, TBX22, AURKB, CDH2O, DDB2, FANCD2, HOXA3, MDM2, PARP1, RB1, TCF12, BAI3, CDH5, DDR2, FANCE, HOXA9, MDM4, PAX5, REM1, TCF3, BAP1, CDK2, DGKB, FANCF, HRAS, MECOM, PCDH15, RET, TCF4, BARD1, CDK4, DGKZ, FAS, HSP90AA1, MEN1, PCDH18, RICTOR, TEK, BAX, CDK6, DIRAS3, FBXW7, IDH1, MET, PCNA, RIPK1, TEP1, BCL11A, CDK7, DLG3, FCGR3A, IDH2, MITF, PDGFA, ROR1, TERT, BCL2, CDK8, DLL1, FES, IFNG, MLH1, PDGFB, ROR2, TET2, BCL2A1, CDKN1A, DNMT1, FGFR1, IGF1R, MLL, PDGFRA, ROS1, TGFBR2, BCL2L1, CDKN1B, DNMT3A, FGFR2, IGF2R, MLL3, PDGFRB, RPS6KA2, THBS1, BCL2L2, CDKN2A, DNMT3B, FGFR3, IKBKE, MPL, PDZRN3, RPTOR, TNFAIP3, BCL3, CDKN2B, DOT1L, FGFR4, IKZF1, MRE11A, PHLPP2, RSPO2, TNKS, BCL6, CDKN2C, DPYD, FH, IL2RG, MSH2, PIK3C3, RSPO3, TNKS2, BCR, CDKN2D, E2F1, FHOD3, INHBA, MSH6, PIK3CA, RUNX1, TNNI3K, BIRC5, CDX2, EED, FIGF, INSR, MTHFR, PIK3CB, SDHB, TNR, BIRC6, CEBPA, EGF, FLG2, IRS1, MTOR, PIK3CD, SF3B1, TOP1, BLM, CERK, EGFR, FLNC, IRS2, MUTYH, PIK3CG, SHC1, and TOP2A.

[0011] The sample can be selected from the group consisting of: blood, serum, plasma, urine, sweat, tears, saliva, sputum, components thereof or any combination thereof.

[0012] Steps (a) and (b) can be performed at a plurality of time points to monitor the status of the cancer over time. One time point can be prior to a first administration of a cancer therapy and a subsequent time point can be subsequent to a first administration.

[0013] The method can further comprise generating a report communicating the profile of genetic abnormalities for the set of genes and communicating the report to a caregiver.

[0014] The report can comprise a list of one or more therapeutic candidates based on the profile.

[0015] The report can be generated within two weeks from collection of the solid tissue sample. In some instances, the report is generated within 1 week from collection of the solid tissue sample.

[0016] In some embodiments, the report comprises copy number alterations of the set of genes.

[0017] In some embodiments, the report comprises a description of a therapeutic agent targeting a abnormality.

[0018] The methods described herein further comprises generating a report communicating the profile of the subset of genes at each of the plurality of time points.

[0019] In some embodiments of any of the methods herein, the determining comprises the step of diluting nucleic acid molecules from the sample into discrete reaction volumes, wherein the discrete reaction volumes contain on average less than 10, 5, 4, 3, 2, or 1 nucleic acid molecule from the sample.

[0020] The discrete reaction volumes can be droplets in an emulsion. The discrete reaction volumes further comprise primers for allelic discrimination of the genetic abnormalities in the subset of genes

[0021] Determining the status comprises quantifying the number of nucleic acids harboring the genetic abnormalities in the subset of genes.

[0022] The step of targeted sequencing can comprise preparing a DNA library from the solid tissue sample in less than 8, 7, 6, 5, or 4 hours.

[0023] The preparing may not require exponential PCR amplification prior to sequencing of the library.

[0024] The preparing can comprise a linear amplification step. In some embodiments the preparing does not require amplification.

[0025] In some embodiments, the step of targeted sequencing comprises (a) contacting a single-stranded DNA fragment from the solid tissue sample with a target-specific oligonucleotide comprising (i) a region specific for a region of a cancer-related gene and (ii) an adaptor sequence specific for coupling to a sequencing platform; (b) performing a hybridization reaction to join the target specific oligonucleotides to a single-stranded DNA fragment containing a region of complementarity to the target-specific oligonucleotide; (c) performing an extension reaction to create an extension product comprising the region and comprising the adaptor; and (d) sequencing the extension product.

[0026] Contacting can occur with the target-specific oligonucleotide attached to a sequencing platform.

[0027] Contacting can occur with the target-specific oligonucleotide free in a solution.

[0028] In some aspects, the present invention provides methods and kits for the sensitive detection of a mutation in a target polynucleotide.

[0029] The invention also provides an oligonucleotide primer, comprising a probe-binding region and a template binding region. In some embodiments, the template binding region is at least 50% complementary to a template nucleic acid suspected of harboring a mutation. In some embodiments, a portion of the template binding region at least partially overlays a locus of the suspected mutation. In some embodiments, the oligonucleotide primer upon hybridization to the template nucleic acid is extendable by a polymerase if the mutation is present but is not extendable by the polymerase if the mutation is not present.

[0030] In some embodiments, the template binding region comprises a 3′ terminal region that overlays the mutation locus. In some embodiments, the 3′ terminal region that overlays the mutation locus comprises 1, 2, 3, 4, 5, or more than 5 bases of the 3′-end of the template binding region.

[0031] In some embodiments, the mutation is a single nucleotide polymorphism (SNP).

[0032] In particular embodiments, the 3′ terminal region comprises a base that overlays the SNP locus. In some embodiments, the base is complementary to a mutant allele of the SNP locus. In some embodiments, the base is complementary to a wild-type allele of the SNP locus.

[0033] In some embodiments, the probe-binding region does not hybridize to any genomic sequence from the subject.

[0034] In some embodiments, the polymerase is a DNA polymerase lacking 3′ to 5′ exonuclease activity.

[0035] The invention also provides a kit comprising: (a) an oligonucleotide primer, wherein the oligonucleotide primer comprises (i) a probe-binding region and a template binding region that is at least 70% complementary to a template nucleic acid suspected of harboring a mutation, wherein a portion of the template binding region at least partially overlays locus of the suspected mutation, wherein the oligonucleotide primer upon hybridization to the template nucleic acid is extendable by a polymerase if the mutation is present but is not extendable by the polymerase if the mutation is not present; and (b) instructions for use.

[0036] In some embodiments, the mutation is a single nucleotide polymorphism (SNP).

[0037] In some embodiments, the template binding region comprises a 3′ terminal base that overlays the SNP locus.

[0038] In some embodiments, the 3′ terminal base is complementary to a mutant allele of the SNP locus.

[0039] In some embodiments, the 3′ terminal base is complementary to a wild-type allele of the SNP locus.

[0040] In some embodiments, the probe-binding region does not hybridize to any genomic sequence from the subject.

[0041] In some embodiments, the kit further comprises a reporter probe that is at least 70% complementary to the probe binding region.

[0042] In some embodiments, the reporter probe comprises a detectable moiety and a quencher moiety, wherein the quencher moiety suppresses detection of the detectable moiety when the reporter probe is intact.

[0043] In some embodiments, the kit further comprises a reverse primer that is at least 70% complementary to a reverse complement sequence downstream of the locus.

[0044] In some embodiments, the kit further comprises a polymerase.

[0045] In some embodiments, the polymerase is a thermostable polymerase having a 5′ to 3′ exonuclease activity and not having a 3′ to 5′ exonuclease activity.

[0046] In some embodiments, the kit further comprises (i) one or more alternative oligonucleotide primers, wherein the one or more alternative oligonucleotide primers each comprises a distinct probe binding region and a template binding region that is at least 70% complementary to the template nucleic acid, wherein a portion of the template binding region at least partially overlays the locus, wherein the alternative oligonucleotide primer upon hybridization to the template nucleic acid is extendable by a polymerase if an alternative allele is present but is not extendable by the polymerase if the alternative allele is not present.

[0047] In some embodiments, the kit further comprises one or more alternative reporter probes, wherein each of the alternative reporter probes is at least 70% complementary to one of the distinct probe binding regions but not to any other probe binding region of the kit.

[0048] In some embodiments, each of the alternative reporter probes comprises an alternative detectable moiety and a quencher moiety, wherein each of the detectable moieties of the kit is detectably distinct from any other detectable moiety of the kit.

[0049] In some embodiments, a hybridization product consisting of the oligonucleotide primer and reporter probe has a Tm that is at least 10 degrees higher than a Tm of a hybridization product consisting of the oligonucleotide primer and the template nucleic acid.

[0050] In another aspect, the invention provides a method of detecting a mutation in a target polynucleotide region, comprising: (a) selectively hybridizing an oligonucleotide primer to the target polynucleotide region, wherein the oligonucleotide primer comprises (i) a probe-binding region, and (ii) a template binding region that is at least 70% complementary to a template nucleic acid suspected of harboring a mutation, wherein a portion of the template binding region at least partially overlays a locus of the suspected mutation, and wherein the oligonucleotide primer upon hybridization to the template nucleic acid is extendable by a polymerase if the mutation is present but is not extendable by the polymerase if the mutation is not present; (b) extending the hybridized oligonucleotide primer to form an extension product; and (c) detecting the extension product, whereby the detecting indicates the presence of the mutation.

[0051] In some embodiments, extending comprises extending with a DNA polymerase that does not comprise 3′ to 5′ exonuclease activity.

[0052] In some embodiments, detecting comprises selectively hybridizing a reporter probe to the probe binding region.

[0053] In some embodiments, the reporter probe comprises a detectable moiety and a quencher moiety, wherein the quencher moiety suppresses detection of the detectable moiety when the reporter probe is intact.

[0054] In some embodiments, detecting further comprises separating the detectable moiety from the quencher moiety of the hybridized reporter probe.

[0055] In some embodiments, the method further comprises amplifying the extension product with a reverse primer that is capable of hybridizing to a region of the extension product downstream of the locus.

[0056] In some embodiments, amplifying comprises amplifying with a DNA polymerase that comprises 5′ to 3′ exonuclease activity.

[0057] In some embodiments, the method further comprises selectively hybridizing one or more alternative oligonucleotide primers to the target polynucleotide region, wherein the one or more alternative oligonucleotide primers each comprises a distinct probe binding region and a template binding region that is at least 70% complementary to the template nucleic acid, wherein a portion of the template binding region at least partially overlays the locus, wherein the alternative oligonucleotide primer upon hybridization to the template nucleic acid is extendable by a polymerase if an alternative allele is present but is not extendable by the polymerase if the alternative allele is not present.

[0058] In some embodiments, detecting further comprises selectively hybridizing one or more alternative reporter probes to the one or more alternative oligonucleotide primers, wherein each of the alternative reporter probes is at least 70% complementary to one of the distinct probe binding regions but not to any other of the probe binding regions.

[0059] In some embodiments, each of the alternative reporter probes comprises an alternative detectable moiety and a quencher moiety, wherein each of the alternative detectable moieties is detectably distinct from any other of the detectable moieties.

[0060] In some embodiments, the mutation is a single nucleotide polymorphism (SNP).

[0061] In some embodiments, the template binding region comprises a 3′ terminal region comprising a base that overlays the SNP locus.

[0062] In some embodiments, wherein the base is complementary to a mutant allele of the SNP locus.

[0063] In some embodiments, the base is complementary to a wild-type allele of the SNP locus. In some embodiments, the probe-binding region does not hybridize to the target polynucleotide region.

[0064] In some embodiments, a hybridization product of the oligonucleotide primer and reporter probe has a Tm that is at least 10 degrees higher than a Tm of a hybridization product between the oligonucleotide primer and target polynucleotide.

[0065] In some embodiments, a concentration of the reporter probe is at least 10× a concentration of the forward primer.

[0066] In some embodiments, the nucleic acid sample is subdivided into a plurality of discrete reaction volumes prior to steps b-c.

[0067] In some embodiments, the method further comprises detection of the detectable moiety in each of the reaction volumes.

[0068] In some embodiments, the method further comprises counting a number of the reaction volumes wherein the detectable moiety is detected.

[0069] In some embodiments, the nucleic acid sample is subdivided such that the plurality of discrete reaction volumes contain an average of <1 template nucleic acid molecule.

[0070] In some embodiments, the method further comprises providing a conclusion and transmitting the conclusion over a network.

[0071] The invention also provides a composition comprising (a) an oligonucleotide primer hybridized to a template nucleic acid, wherein the template nucleic acid comprises a wild-type allele at a locus, wherein the 3′ terminal region of the oligonucleotide primer overlays the locus and is not complementary to the wild-type allele; and (b) an intact reporter probe comprising a detectable and quencher moiety, wherein the intact reporter probe is hybridized to the oligonucleotide primer.

[0072] The invention also provides a method, comprising: (a) hybridizing a target-selective oligonucleotide (TSO) to a single-stranded DNA (ssDNA) fragment in an ssDNA library to create a hybridization product; and (b) amplifying the hybridization product to create a double stranded extension product, wherein the TSO comprises (i) a sequence that is complementary to a single target region and (ii) a first single-stranded adaptor sequence located at a first end of the TSO but not to both ends of the TSO, and wherein the ssDNA fragment comprises a second single-stranded adaptor sequence but does not comprise the first single-stranded adaptor sequence. In some embodiments, the second single-stranded adaptor sequence is located at a first end of the ssDNA fragment but not at both ends of the ssDNA fragment. In some embodiments, the amplifying comprises linear amplification. In some embodiments, the second single-stranded adaptor sequence is located at a first end of the ssDNA fragment but not at both ends of the ssDNA fragment. In some embodiments, the first end of the ssDNA fragment is a 5′ end. In some embodiments, the first adaptor sequence comprises a barcode sequence. In some embodiments, the first or second adaptor sequence comprises a barcode sequence. In some embodiments, the first end of the TSO is a 5′ end. In some embodiments, the first or second adaptor sequence comprises a sequence that is at least 70% identical to a support-bound oligonucleotide conjugated to a solid support. In some embodiments, the solid support is coupled to a sequencing platform. In some embodiments, the first or second adaptor sequence comprises a binding site for a sequencing primer. In some embodiments, the method further comprises annealing the extension products to the support-bound oligonucleotides. In some embodiments, the method further comprises amplifying the annealed extension products. In some embodiments, the method further comprises sequencing the annealed extension products. In some embodiments, the ssDNA library comprises genomic DNA fragments. In some embodiments, the ssDNA library comprises cDNA fragments.

[0073] In some embodiments, the method further comprises removing unhybridized TSOs and unhybridized ssDNA library members. In some embodiments, steps (a) and (b) are performed when the ssDNA library members and the TSOs are free-floating in a solution.

[0074] In some embodiments, the single target region flanks a genomic region. In some embodiments, the genomic region comprises a portion of an exon region from a cancer-related gene. In some embodiments, the cancer-related gene is selected from the group consisting of ABCA1, BRAF, CHD5, EP300, FLT1, ITPA, MYC, P1K3R1, SKP2, TP53, ABCA7, BRCA1, CHEK1, EPHA3, FLT3, JAK1, MYCL1, PIK3R2, SLC19A1, TP73, ABCB1, BRCA2, CHEK2, EPHA5, FLT4, JAK2, MYCN, PKHD1, SLC1A6, TPM3, ABCC2, BRIP1, CLTC, EPHA6, FN1, JAK3, MYH2, PLCB1, SLC22A2, TPMT, ABCC3, BUB1B, COL1A1, EPHA7, FOS, JUN, MYH9, PLCG1, SLCO1B3, TPO, ABCC4, Clorf144, COPS5, EPHA8, FOXO1, KBTBD11, NAV3, PLCG2, SMAD2, TPR, ABCG2, CABLES1, CREB1, EPHB1, FOXO3, KDM6A, NBN, PML, SMAD3, TR10, ABL1, CACNA2D1, CREBBP, EPHB4, FOXP4, KDR, NCOA2, PMS2, SMAD4, TRRAP, ABL2, CAMKV, CRKL, EPHB6, GAB1, KIT, NEK11, PPARG, SMARCA4, TSC1, ACVR1B, CARD11, CRLF2, EPO, GATA1, KLF6, NF1, PPARGC1A, SMARCB1, TSC2, ACVR2A, CARM1, CSF1R, ERBB2, GLI1, KLHDC4, NF2, PPP1R3A, SMO, TTK, ADCY9, CAV1, CSMD3, ERBB3, GLI3, KRAS, NKX2-1, PPP2R1A, SOCS1, TYK2, AGAP2, CBFA2T3, CSNK1G2, ERBB4, GNA11, LMO2, NOS2, PPP2R1B, SOD2, TYMS, AKT1, CBL, CTNNA1, ERCC1, GNAQ, LRP1B, NOS3, PRKAA2, SOS1, UGT1A1, AKT2, CCND1, CTNNA2, ERCC2, GNAS, LRP2, NOTCH1, PRKCA, SOX10, UMPS, AKT3, CCND2, CTNNB1, ERCC3, GPR124, LRP6, NOTCH2, PRKCZ, SOX2, USP9X, ALK, CCND3, CYFIP1, ERCC4, GPR133, LTK, NOTCH3, PRKDC, SP1, VEGF, ANAPC5, CCNE1, CYLD, ERCC5, GRB2, MAN1B1, NPM1, PTCH1, SPRy2, VEGFA, APC, CD40LG, CYP19A1, ERCC6, GSK3B, MAP2K1, NQO1, PTCH2, SRC, VHL, APC2, CD44, CYP1B1, ERG, GSTP1, MAP2K2, NR3Cl, PTEN, ST6GAL2, WRN, AR, CD79A, CYP2C19, ERN2, GUCY1A2, MAP2K4, NRAS, PTGS2, STAT1, WT1, ARAF, CD79B, CYP2C8, ESR1, HDAC1, MAP2K7, NRP2, PTPN11, STAT3, XPA, ARFRP1, CDC42, CYP2D6, ESR2, HDAC2, MAP3K1, NTRK1, PTPRB, STK11, XPC, ARID1A, CDC42BPB, CYP3A4, ETV4, HGF, MAPK1, NTRK2, PTPRD, SUFU, ZFY, ATM, CDC73, CYP3A5, EWSR1, HIF1A, MAPK3, NTRK3, RAD50, SULT1A1, ZNF521, ATP5A1, CDH1, DACH2, EXT1, HM13, MAPK8, OMA1, RAD51, SUZ12, ATR, CDH10, DCC, EZH2, HMGA1, MARK3, OR10R2, RAFT, TAF1, AURKA, CDH2, DCLK3, FANCA, HNF1A, MCL1, PAK3, RARA, TBX22, AURKB, CDH2O, DDB2, FANCD2, HOXA3, MDM2, PARP1, RB1, TCF12, BAI3, CDH5, DDR2, FANCE, HOXA9, MDM4, PAX5, REM1, TCF3, BAP1, CDK2, DGKB, FANCF, HRAS, MECOM, PCDH15, RET, TCF4, BARD1, CDK4, DGKZ, FAS, HSP90AA1, MEN1, PCDH18, RICTOR, TEK, BAX, CDK6, DIRAS3, FBXW7, IDH1, MET, PCNA, RIPK1, TEP1, BCL11A, CDK7, DLG3, FCGR3A, IDH2, MITF, PDGFA, ROR1, TERT, BCL2, CDK8, DLL1, FES, IFNG, MLH1, PDGFB, ROR2, TET2, BCL2A1, CDKN1A, DNMT1, FGFR1, IGF1R, MLL, PDGFRA, ROS1, TGFBR2, BCL2L1, CDKN1B, DNMT3A, FGFR2, IGF2R, MLL3, PDGFRB, RPS6KA2, THBS1, BCL2L2, CDKN2A, DNMT3B, FGFR3, IKBKE, MPL, PDZRN3, RPTOR, TNFAIP3, BCL3, CDKN2B, DOT1L, FGFR4, IKZF1, MRE11A, PHLPP2, RSPO2, TNKS, BCL6, CDKN2C, DPYD, FH, IL2RG, MSH2, PIK3C3, RSPO3, TNKS2, BCR, CDKN2D, E2F1, FHOD3, INHBA, MSH6, PIK3CA, RUNX1, TNNI3K, BIRC5, CDX2, EED, FIGF, INSR, MTHFR, PIK3CB, SDHB, TNR, BIRC6, CEBPA, EGF, FLG2, IRS1, MTOR, PIK3CD, SF3B1, TOP1, BLM, CERK, EGFR, FLNC, IRS2, MUTYH, PIK3CG, SHC1, and TOP2A.

[0075] The invention also provides a method of preparing a single-stranded DNA library, comprising: (a) denaturing a double stranded DNA fragment into single stranded DNA (ssDNA) fragments; (b) removing 5′ phosphates from the ssDNA fragments; (c) ligating single-stranded primer docking oligonucleotides (pdo's) to 3′ ends of the ssDNA fragments, wherein the pdo's are conjugated to a capture moiety capable of binding to an immobilized capturing reagent; (d) hybridizing primers to the pdo's, wherein the primers comprise a sequence complementary to the adaptor oligonucleotide sequence and comprise a first adaptor sequence that is at least 70% identical to a support-bound oligonucleotide coupled to a sequencing platform; (e) extending the hybridized primers to create duplexes, wherein each duplex comprises an ss fragment and an extended primer strand; immobilizing the duplexes to the immobilized capturing reagent; (f) denaturing the double-stranded extension product, wherein the denaturing results in release of the extended primer strands from the immobilized capturing reagent and retention of the ssDNA fragments on the immobilized capturing reagent; and (g) collecting the extended primer strands, wherein the extended primer strands comprise the ss DNA library. In some embodiments, step (c) results in ligation of at least 50% of the ssDNA fragments to the pdo's. In some embodiments, the ligating is performed using an ATP-dependent ligase. In some embodiments, the ATP-dependent ligase is an RNA ligase. In some embodiments, the RNA ligase is CircLigase or CircLigase II. In some embodiments, the pdo's are adenylated. In some embodiments, the extending is performed using a proofreading DNA polymerase.

[0076] The invention also provides a method of preparing a single-stranded DNA library, comprising: denaturing a double stranded DNA fragment into single stranded DNA (ssDNA) fragments; ligating a first single-stranded adaptor sequence to a first end of the ssDNA fragments; and ligating a second single-stranded adaptor sequence to a second end of the ssDNA fragments.

[0077] The invention also provides a kit, comprising: a primer docking oligonucleotide (pdo), wherein the pdo is conjugated to a capture moiety capable of binding to an immobilized capturing reagent; a primer, wherein the primer comprises a sequence that is at least 70% complementary to the pdo sequence and further comprises a first adaptor sequence that is at least 70% identical to a first support-bound oligonucleotide coupled to a sequencing platform; and instructions for use. In some embodiments, the kit further comprises an ATP-dependent ligase. In some embodiments, the ATP-dependent ligase is an RNA ligase.

[0078] In some embodiments, the RNA ligase is CircLigase or CircLigase II. In some embodiments, the kit further comprises a proofreading DNA polymerase. In some embodiments, the kit further comprises the immobilized capturing reagent.

[0079] In some embodiments, the first adaptor sequence comprises a sequence that is at least 70% complementary to a first sequencing primer. In some embodiments, the first adaptor sequence comprises a barcode sequence. In some embodiments, the kit further comprises a target-selective oligonucleotide (TSO). In some embodiments, the TSO further comprises a second adaptor sequence located at a first end of the TSO but not a second end of the TSO. In some embodiments, the first end of the TSO is a 5′ end. In some embodiments, the second adaptor sequence comprises a sequence that is at least 70% identical to a second support-bound oligonucleotide coupled to a sequencing platform. In some embodiments, the second adaptor sequence comprises a binding site for a sequencing primer.

[0080] The invention also provides a kit, comprising: a first adaptor oligonucleotide, wherein the first adaptor comprises a sequence that is at least 70% complementary to a first support-bound oligonucleotide coupled to a sequencing platform; a second adaptor oligonucleotide, wherein the second adaptor comprises a sequence that is distinct from the first adaptor oligonucleotide; an RNA ligase; and instructions for use. In some embodiments, the second adaptor comprises a sequence that is at least 70% complementary to a sequencing primer. In some embodiments, the second adaptor comprises a sequence that is at least 70% complementary to a second support-bound oligonucleotide coupled to a sequencing platform. In some embodiments, the first adaptor comprises a sequence that is at least 70% complementary to a sequencing primer. In some embodiments, one of the first or second adaptor comprises a barcode sequence. In some embodiments, the first adaptor comprises a 3′ terminal blocking group that prevents the formation of a covalent bond between the 3′ terminal base and another nucleotide. In some embodiments, the 3′ terminal blocking group is dideoxy-dNTP, biotin, or other possible blocking group. In some embodiments, the first adaptor comprises a 5′polyadenylation sequence. In some embodiments, the RNA ligase is truncated or mutated ligase 2 from T4 or Mth. In some embodiments, the kit further comprises a second RNA ligase. In some embodiments, the second RNA ligase is CircLigase or CircLigase II.

### INCORPORATION BY REFERENCE

[0081] All publications, patents, and patent applications mentioned in this specification are herein incorporated by reference to the same extent as if each individual publication, patent, or patent application was specifically and individually indicated to be incorporated by reference.

### BRIEF DESCRIPTION OF THE DRAWINGS

[0082] The novel features of the invention are set forth with particularity in the appended claims. A better understanding of the features and advantages of the present invention will be obtained by reference to the following detailed description that sets forth illustrative embodiments, in which the principles of the invention are utilized, and the accompanying drawings of which:

[0083] FIG. 1 depicts an exemplary workflow of a method for assessing cancer in a subject.

[0084] FIG. 2 depicts an exemplary workflow of a method for sequencing a tumor cell and a normal cell in a subject.

[0085] FIG. 3 depicts an exemplary embodiment of a method for collecting a tumor and blood sample from a subject.

[0086] FIG. 4 depicts an exemplary workflow for a method of preparing a DNA library from a tumor sample of a subject.

[0087] FIG. 5 depicts an exemplary embodiment of a method of preparing a DNA library from a tumor sample of a subject.

[0088] FIG. 6 depicts an exemplary embodiment of a method of assessing tumor-specific mutations in cell-free DNA from a blood sample of a subject FIGS. 7A and 7B depict an exemplary workflow for allele detection in a sample.

[0089] FIG. 8 depicts an exemplary embodiment of a subject-specific report of tumor-specific mutations in a subject.

[0090] FIG. 9 depicts a workflow used for assessment of a colon cancer subject.

[0091] FIG. 10 depicts results from a validation assay for detecting alleles of a mutation found in the tumor of the colon cancer patient.

[0092] FIG. 11 depicts a system for software facilitation.

[0093] FIG. 12 depicts results from a validation assay for detecting alleles of a mutation found in the tumor of the colon cancer patient.

### DETAILED DESCRIPTION OF THE INVENTION

[0094] The practice of the present invention will employ, unless otherwise indicated, conventional techniques of molecular biology, microbiology and recombinant DNA techniques, which are within the skill of the art. Such techniques are explained fully in the literature. See, e.g., Sambrook, Fritsch & Maniatis, Molecular Cloning: A Laboratory Manual, Second Edition (1989); Oligonucleotide Synthesis (M. J. Gait, ed., 1984); Nucleic Acid Hybridization (B. D. Hames & S. J. Higgins, eds., 1984); A Practical Guide to Molecular Cloning (B. Perbal, 1984); and a series, Methods in Enzymology (Academic Press, Inc.). All patents, patent applications, and publications mentioned herein, both supra and infra, are hereby incorporated by reference.

### DEFINITIONS

[0095] As used in the specification and claims, the singular forms “a”, “an” and “the” can include plural references unless the context clearly dictates otherwise. For example, the term “a cell” can include a plurality of cells, including mixtures thereof.

[0096] The term “subject”, as used herein, generally refers to a biological entity containing expressed genetic materials. The biological entity can be a plant, animal, or microorganism, including, e.g., bacteria, viruses, fungi, and protozoa. The subject can be tissues, cells and their progeny of a biological entity obtained in vivo or cultured in vitro. The subject can be a mammal. The mammal can be a human. The human may be diagnosed or suspected of being at high risk for a disease. The disease can be cancer. The human may not be diagnosed or suspected of being at high risk for a disease.

[0097] As used herein, a “sample” or “nucleic acid sample” can refer to any substance containing or presumed to contain nucleic acid. The sample can be a biological sample obtained from a subject. The nucleic acids can be RNA, DNA, e.g., genomic DNA, mitochondrial DNA, viral DNA, synthetic DNA, or cDNA reverse transcribed from RNA. The nucleic acids in a nucleic acid sample generally serve as templates for extension of a hybridized primer. In some embodiments, the biological sample is a liquid sample. The liquid sample can be whole blood, plasma, serum, ascites, cerebrospinal fluid, sweat, urine, tears, saliva, buccal sample, cavity rinse, or organ rinse. The liquid sample can be an essentially cell-free liquid sample (e.g., plasma, serum, sweat, urine, tears, etc). In other embodiments, the biological sample is a solid biological sample, e.g., feces or tissue biopsy, e.g., a tumor biopsy. A sample can also comprise in vitro cell culture constituents (including but not limited to conditioned medium resulting from the growth of cells in cell culture medium, recombinant cells and cell components).

[0098] “Nucleotides” can be biological molecules that can form nucleic acids. Nucleotides can have moieties that contain not only the known purine and pyrimidine bases, but also other heterocyclic bases that have been modified. Such modifications include methylated purines or pyrimidines, acylated purines or pyrimidines, alkylated riboses, or other heterocycles. In addition, the term “nucleotide” includes those moieties that contain hapten, biotin, or fluorescent labels and may contain not only conventional ribose and deoxyribose sugars, but other sugars as well. Modified nucleosides or nucleotides also include modifications on the sugar moiety, e.g., wherein one or more of the hydroxyl groups are replaced with halogen atoms or aliphatic groups, are functionalized as ethers, amines, or the like.

[0099] “Nucleotides” can also include locked nucleic acids (LNA) or bridged nucleic acids (BNA). BNA and LNA generally refer to modified ribonucleotides wherein the ribose moiety is modified with a bridge connecting the 2′ oxygen and 4′ carbon. Generally, the bridge “locks” the ribose in the 3′-endo (North) conformation, which is often found in the A-form duplexes. The term “locked nucleic acid” (LNA) generally refers to a class of BNAs, where the ribose ring is “locked” with a methylene bridge connecting the 2′-O atom with the 4′-C atom. LNA nucleosides containing the six common nucleobases (T, C, G, A, U and mC) that appear in DNA and RNA are able to form base-pairs with their complementary nucleosides according to the standard Watson-Crick base pairing rules. Accordingly, BNA and LNA nucleotides can be mixed with DNA or RNA bases in an oligonucleotide whenever desired. The locked ribose conformation enhances base stacking and backbone pre-organization. Base stacking and backbone pre-organization can give rise to an increased thermal stability (e.g., increased Tm) and discriminative power of duplexes. LNA can discriminate single base mismatches under conditions not possible with other nucleic acids. Locked nucleic acid is disclosed for example in WO 99/14226. Nucleotides can also include modified nucleotides as described in European Patent Application No. EP1995330.

[0100] The terms “polynucleotides”, “nucleic acid”, “nucleotides” and “oligonucleotides” can be used interchangeably. They can refer to a polymeric form of nucleotides of any length, either deoxyribonucleotides or ribonucleotides, or analogs thereof. Polynucleotides may have any three-dimensional structure, and may perform any function, known or unknown. The following are non-limiting examples of polynucleotides: coding or non-coding regions of a gene or gene fragment, loci (locus) defined from linkage analysis, exons, introns, messenger RNA (mRNA), transfer RNA, ribosomal RNA, ribozymes, cDNA, recombinant polynucleotides, branched polynucleotides, plasmids, vectors, isolated DNA of any sequence, isolated RNA of any sequence, nucleic acid probes, and primers. A polynucleotide may comprise modified nucleotides, such as methylated nucleotides and nucleotide analogs. If present, modifications to the nucleotide structure may be imparted before or after assembly of the polymer. The sequence of nucleotides may be interrupted by non-nucleotide components. A polynucleotide may be further modified after polymerization, such as by conjugation with a labeling component.

[0101] The term “target polynucleotide,” as use herein, generally refers to a polynucleotide of interest under study. In certain embodiments, a target polynucleotide contains one or more sequences that are of interest and under study. A target polynucleotide can comprise, for example, a genomic sequence. The target polynucleotide can comprise a target sequence whose presence, amount, and/or nucleotide sequence, or changes in these, are desired to be determined.

[0102] The target polynucleotide can be a region of gene associated with a disease. In some embodiments, the region is an exon. In some embodiments, the gene is a druggable target. The term “druggable target”, as used herein, generally refers to a gene or cellular pathway that is modulated by a disease therapy. The disease can be cancer. Accordingly, the gene can be a known cancer-related gene. In some embodiments, the cancer-related gene is selected from the group consisting of ABCA1, BRAF, CHD5, EP300, FLT1, ITPA, MYC, P1K3R1, SKP2, TP53, ABCA7, BRCA1, CHEK1, EPHA3, FLT3, JAK1, MYCL1, PIK3R2, SLC19A1, TP73, ABCB1, BRCA2, CHEK2, EPHA5, FLT4, JAK2, MYCN, PKHD1, SLC1A6, TPM3, ABCC2, BRIP1, CLTC, EPHA6, FN1, JAK3, MYH2, PLCB1, SLC22A2, TPMT, ABCC3, BUB1B, COL1A1, EPHA7, FOS, JUN, MYH9, PLCG1, SLCO1B3, TPO, ABCC4, Clorf144, COPS5, EPHA8, FOXO1, KBTBD11, NAV3, PLCG2, SMAD2, TPR, ABCG2, CABLES1, CREB1, EPHB1, FOXO3, KDM6A, NBN, PML, SMAD3, TR10, ABL1, CACNA2D1, CREBBP, EPHB4, FOXP4, KDR, NCOA2, PMS2, SMAD4, TRRAP, ABL2, CAMKV, CRKL, EPHB6, GAB1, KIT, NEK11, PPARG, SMARCA4, TSC1, ACVR1B, CARD11, CRLF2, EPO, GATA1, KLF6, NF1, PPARGC1A, SMARCB1, TSC2, ACVR2A, CARM1, CSF1R, ERBB2, GLI1, KLHDC4, NF2, PPP1R3A, SMO, TTK, ADCY9, CAV1, CSMD3, ERBB3, GLI3, KRAS, NKX2-1, PPP2R1A, SOCS1, TYK2, AGAP2, CBFA2T3, CSNK1G2, ERBB4, GNA11, LMO2, NOS2, PPP2R1B, SOD2, TYMS, AKT1, CBL, CTNNA1, ERCC1, GNAQ, LRP1B, NOS3, PRKAA2, SOS1, UGT1A1, AKT2, CCND1, CTNNA2, ERCC2, GNAS, LRP2, NOTCH1, PRKCA, SOX10, UMPS, AKT3, CCND2, CTNNB1, ERCC3, GPR124, LRP6, NOTCH2, PRKCZ, SOX2, USP9X, ALK, CCND3, CYFIP1, ERCC4, GPR133, LTK, NOTCH3, PRKDC, SP1, VEGF, ANAPC5, CCNE1, CYLD, ERCC5, GRB2, MAN1B1, NPM1, PTCH1, SPRY2, VEGFA, APC, CD40LG, CYP19A1, ERCC6, GSK3B, MAP2K1, NQO1, PTCH2, SRC, VHL, APC2, CD44, CYP1B1, ERG, GSTP1, MAP2K2, NR3Cl, PTEN, ST6GAL2, WRN, AR, CD79A, CYP2C19, ERN2, GUCY1A2, MAP2K4, NRAS, PTGS2, STAT1, WT1, ARAF, CD79B, CYP2C8, ESR1, HDAC1, MAP2K7, NRP2, PTPN11, STAT3, XPA, ARFRP1, CDC42, CYP2D6, ESR2, HDAC2, MAP3K1, NTRK1, PTPRB, STK11, XPC, ARID1A, CDC42BPB, CYP3A4, ETV4, HGF, MAPK1, NTRK2, PTPRD, SUFU, ZFY, ATM, CDC73, CYP3A5, EWSR1, HIF1A, MAPK3, NTRK3, RAD50, SULT1A1, ZNF521, ATP5A1, CDH1, DACH2, EXT1, HM13, MAPK8, OMA1, RAD51, SUZ12, ATR, CDH10, DCC, EZH2, HMGA1, MARK3, OR10R2, RAFT, TAF1, AURKA, CDH2, DCLK3, FANCA, HNF1A, MCL1, PAK3, RARA, TBX22, AURKB, CDH2O, DDB2, FANCD2, HOXA3, MDM2, PARP1, RB1, TCF12, BAI3, CDH5, DDR2, FANCE, HOXA9, MDM4, PAX5, REM1, TCF3, BAP1, CDK2, DGKB, FANCF, HRAS, MECOM, PCDH15, RET, TCF4, BARD1, CDK4, DGKZ, FAS, HSP90AA1, MEN1, PCDH18, RICTOR, TEK, BAX, CDK6, DIRAS3, FBXW7, IDH1, MET, PCNA, RIPK1, TEP1, BCL11A, CDK7, DLG3, FCGR3A, IDH2, MITF, PDGFA, ROR1, TERT, BCL2, CDK8, DLL1, FES, IFNG, MLH1, PDGFB, ROR2, TET2, BCL2A1, CDKN1A, DNMT1, FGFR1, IGF1R, MLL, PDGFRA, ROS1, TGFBR2, BCL2L1, CDKN1B, DNMT3A, FGFR2, IGF2R, MLL3, PDGFRB, RPS6KA2, THBS1, BCL2L2, CDKN2A, DNMT3B, FGFR3, IKBKE, MPL, PDZRN3, RPTOR, TNFAIP3, BCL3, CDKN2B, DOT1L, FGFR4, IKZF1, MRE11A, PHLPP2, RSPO2, TNKS, BCL6, CDKN2C, DPYD, FH, IL2RG, MSH2, PIK3C3, RSPO3, TNKS2, BCR, CDKN2D, E2F1, FHOD3, INHBA, MSH6, PIK3CA, RUNX1, TNNI3K, BIRC5, CDX2, EED, FIGF, INSR, MTHFR, PIK3CB, SDHB, TNR, BIRC6, CEBPA, EGF, FLG2, IRS1, MTOR, PIK3CD, SF3B1, TOP1, BLM, CERK, EGFR, FLNC, IRS2, MUTYH, PIK3CG, SHC1, and TOP2A.

[0103] The term “genomic sequence”, as used herein, generally refers to a sequence that occurs in a genome. Because RNAs are transcribed from a genome, this term encompasses sequence that exist in the nuclear genome of an organism, as well as sequences that are present in a cDNA copy of an RNA (e.g., an mRNA) transcribed from such a genome.

[0104] The terms “anneal”, “hybridize” or “bind,” can refer to two polynucleotide sequences, segments or strands, and can be used interchangeably and have the usual meaning in the art. Two complementary sequences (e.g., DNA and/or RNA) can anneal or hybridize by forming hydrogen bonds with complementary bases to produce a double-stranded polynucleotide or a double-stranded region of a polynucleotide.

[0105] As used herein, the term “complementary” generally refers to a relationship between two antiparallel nucleic acid sequences in which the sequences are related by the base-pairing rules: A pairs with T or U and C pairs with G. A first sequence or segment that is “perfectly complementary” to a second sequence or segment is complementary across its entire length and has no mismatches. A first sequence or segment is “substantially complementary” to a second sequence of segment when a polynucleotide consisting of the first sequence is sufficiently complementary to specifically hybridize to a polynucleotide consisting of the second sequence.

[0106] The term “duplex,” or “duplexed,” as used herein, can describe two complementary polynucleotides that are base-paired, i.e., hybridized together.

[0107] As used herein, “amplification” of a nucleic acid sequence generally refers to in vitro techniques for enzymatically increasing the number of copies of a target sequence. Amplification methods include both asymmetric methods (in which the predominant product is single-stranded) and conventional methods (in which the predominant product is double-stranded). A “round” or “cycle” of amplification generally refers to a PCR cycle in which a double stranded template DNA molecule is denatured into single-stranded templates, forward and reverse primers are hybridized to the single stranded templates to form primer/template duplexes, primers are extended by a DNA polymerase from the primer/template duplexes to form extension products. In subsequent rounds of amplification the extension products are denatured into single stranded templates and the cycle is repeated.

[0108] The terms “template”, “template strand”, “template DNA” and “template nucleic acid” can be used interchangeably herein to refer to a strand of DNA that is copied by an amplification cycle.

[0109] The term “denaturing,” as used herein, generally refers to the separation of a nucleic acid duplex into two single strands.

[0110] The term “extending”, as used herein, generally refers to the extension of a primer hybridized to a template nucleic acid by the addition of nucleotides using an enzyme, e.g., a polymerase.

[0111] A “primer” is generally a nucleotide sequence (e.g., an oligonucleotide), generally with a free 3′-OH group, that hybridizes with a template sequence (such as a target polynucleotide, or a primer extension product) and is capable of promoting polymerization of a polynucleotide complementary to the template. A primer can be, for example, a sequence of the template (such as a primer extension product or a fragment of the template created following RNase cleavage of a template-DNA complex) that is hybridized to a sequence in the template itself (for example, as a hairpin loop), and that is capable of promoting nucleotide polymerization. Thus, a primer can be an exogenous (e.g., added) primer or an endogenous (e.g., template fragment) primer.

[0112] The terms “determining”, “measuring”, “evaluating”, “assessing,” “assaying,” and “analyzing” can be used interchangeably herein to refer to any form of measurement, and include determining if an element is present or not. These terms can include both quantitative and/or qualitative determinations. Assessing may be relative or absolute. “Assessing the presence of” can include determining the amount of something present, as well as determining whether it is present or absent.

[0113] As used herein, the term “Tm” generally refers to the melting temperature of an oligonucleotide duplex at which half of the duplexes remain hybridized and half of the duplexes dissociate into single strands. See Sambrook and Russell (2001; Molecular Cloning: A Laboratory Manual, 3.sup.rd ed., Cold Spring Harbor Press, Cold Spring Harbor N.Y., ch. 10).

[0114] The term “free in solution,” as used here, can describe a molecule, such as a polynucleotide, that is not bound or tethered to a solid support.

[0115] The term “genomic fragment”, as used herein, can refer to a region of a genome, e.g., an animal or plant genome such as the genome of a human, monkey, rat, fish or insect or plant. A genomic fragment may or may not be adaptor ligated. A genomic fragment may be adaptor ligated (in which case it has an adaptor ligated to one or both ends of the fragment, to at least the 5′ end of a molecule), or non-adaptor ligated.

[0116] The term “ligating”, as used herein, can refer to the enzymatically catalyzed joining of the terminal nucleotide at the 5′ end of a first DNA molecule to the terminal nucleotide at the 3′ end of a second DNA molecule.

[0117] A “primer binding site” can refer to a site to which a primer hybridizes in an oligonucleotide or a complementary strand thereof.

[0118] The term “separating”, as used herein, can refer to physical separation of two elements (e.g., by size, affinity, degradation of one element etc.).

[0119] The term “sequencing”, as used herein, can refer to a method by which the identity of at least 10 consecutive nucleotides (e.g., the identity of at least 20, at least 50, at least 100, at least 200, or at least 500 or more consecutive nucleotides) of a polynucleotide are obtained.

[0120] The term “adaptor-ligated”, as used herein, can refer to a nucleic acid that has been ligated to an adaptor. The adaptor can be ligated to a 5′ end or a 3′ end of a nucleic acid molecule, or can be added to an internal region of a nucleic acid molecule.

[0121] The term “bridge PCR” can refer to a solid-phase polymerase chain reaction in which the primers that are extended in the reaction are tethered to a substrate by their 5′ ends. During amplification, the amplicons form a bridge between the tethered primers. Bridge PCR (which may also be referred to as “cluster PCR”) is used in Illumina's Solexa platform. Bridge PCR and Illumina's Solexa platform are generally described in a variety of publications, e.g., Gudmundsson et al (Nat. Genet. 2009 41:1122-6), Out et al (Hum. Mutat. 2009 30:1703-12) and Turner (Nat. Methods 2009 6:315-6), U.S. Pat. No. 7,115,400, and publication application publication nos. US20080160580 and US20080286795.

[0122] The term “barcode sequence” as used herein, generally refers to a unique sequence of nucleotides that can encode information about an assay. A barcode sequence can encode information relating to the identity of an interrogated allele, identity of a target polynucleotide or genomic locus, identity of a sample, a subject, or any combination thereof. A barcode sequence can be a portion of a primer, a reporter probe, or both. A barcode sequence may be at the 5′-end or 3′-end of an oligonucleotide, or may be located in any region of the oligonucleotide. A barcode sequence generally is not part of a template sequence. Barcode sequences may vary widely in size and composition; the following references provide guidance for selecting sets of barcode sequences appropriate for particular embodiments: Brenner, U.S. Pat. No. 5,635,400; Brenner et al, Proc. Natl. Acad. Sci., 97: 1665-1670 (2000); Shoemaker et al, Nature Genetics, 14: 450-456 (1996); Morris et al, European patent publication 0799897A1; Wallace, U.S. Pat. No. 5,981,179. A barcode sequence may have a length of about 4 to 36 nucleotides, about 6 to 30 nucleotides, or about 8 to 20 nucleotides.

[0123] The term “mutation”, as used herein, generally refers to a change of the nucleotide sequence of a genome. Mutations can involve large sections of DNA (e.g., copy number variation). Mutations can involve whole chromosomes (e.g., aneuploidy). Mutations can involve small sections of DNA. Examples of mutations involving small sections of DNA include, e.g., point mutations or single nucleotide polymorphisms, multiple nucleotide polymorphisms, insertions (e.g., insertion of one or more nucleotides at a locus), multiple nucleotide changes, deletions (e.g., deletion of one or more nucleotides at a locus), and inversions (e.g., reversal of a sequence of one or more nucleotides).

[0124] The term “locus”, as used herein, can refer to a location of a gene, nucleotide, or sequence on a chromosome. An “allele” of a locus, as used herein, can refer to an alternative form of a nucleotide or sequence at the locus. A “wild-type allele” generally refers to an allele that has the highest frequency in a population of subjects. A “wild-type” allele generally is not associated with a disease. A “mutant allele” generally refers to an allele that has a lower frequency that a “wild-type allele” and may be associated with a disease. A “mutant allele” may not have to be associated with a disease. The term “interrogated allele” generally refers to the allele that an assay is designed to detect.

[0125] The term “single nucleotide polymorphism”, or “SNP”, as used herein, generally refers to a type of genomic sequence variation resulting from a single nucleotide substitution within a sequence. “SNP alleles” or “alleles of a SNP” generally refer to alternative forms of the SNP at particular locus. The term “interrogated SNP allele” generally refers to the SNP allele that an assay is designed to detect.

[0126] In certain cases, an oligonucleotide used in the method described herein may be designed using a reference genomic region, i.e., a genomic region of known nucleotide sequence, e.g., a chromosomal region whose sequence is deposited at NCBI's Genbank database or other database, for example.

[0127] A “plurality” generally contains at least 2 members. In certain cases, a plurality may have at least 10, at least 100, at least 100, at least 10,000, at least 100,000, at least 1000000, at least 10000000, at least 100000000, or at least 1000000000 or more members.

[0128] The term “separating”, as used herein, generally refers to physical separation of two elements (e.g., by cleavage, hydrolysis, or degradation of one of the two elements).

[0129] The terms “label” and “detectable moiety” can be used interchangeably herein to refer to any atom or molecule which can be used to provide a detectable signal, and which can be attached to a nucleic acid or protein. Labels may provide signals detectable by fluorescence, radioactivity, colorimetry, gravimetry, X-ray diffraction or absorption, magnetism, enzymatic activity, and the like.

### Overview

[0130] Aspects of the invention relate to methods and kits that improve the monitoring and treatment of a subject suffering from a disease. The disease can be a cancer, e.g., a tumor, a leukemia such as acute leukemia, acute t-cell leukemia, acute lymphocytic leukemia, acute myelocytic leukemia, myeloblastic leukemia, promyelocytic leukemia, myelomonocytic leukemia, monocytic leukemia, erythroleukemia, chronic leukemia, chronic myelocytic (granulocytic) leukemia, or chronic lymphocytic leukemia, polycythemia vera, lymphomas such as Hodgkin's lymphoma, follicular lymphoma or non-Hodgkin's lymphoma, multiple myeloma, Waldenstrom's macroglobulinemia, heavy chain disease, solid tumors, sarcomas, carcinomas such as, e.g., fibrosarcoma, myxosarcoma, liposarcoma, chondrosarcoma, osteogenic sarcoma, lymphangiosarcoma, mesothelioma, Ewing's tumor, leiomyosarcoma, rhabdomyosarcoma, colon carcinoma, colorectal cancer, pancreatic cancer, breast cancer, ovarian cancer, prostate cancer, squamous cell carcinoma, basal cell carcinoma, adenocarcinoma, sweat gland carcinoma, sebaceous gland carcinoma, papillary carcinoma, papillary adenocarcinomas, cystadenocarcinoma, medullary carcinoma, bronchogenic, carcinoma, renal cell carcinoma, hepatoma, bile duct carcinoma, choriocarcinoma, seminoma, embryonal carcinoma, Wilms' tumor, cervical cancer, uterine cancer, testicular tumor, lung carcinoma, small cell lung carcinoma, bladder carcinoma, epithelial carcinoma, glioma, craniopharyngioma, ependymoma, pinealoma, hemangioblastoma, acoustic neuroma, oligodendroglioma, meningioma, melanoma, neuroblastoma, retinoblastoma, endometrial cancer, non small cell lung cancer,

[0131] The subject can be suspected or known to harbor a solid tumor, or can be a subject who previously harbored a solid tumor.

[0132] FIG. 1 depicts an exemplary workflow of a method for assessing cancer. In step 110, the method comprises sequencing cancer-related genes from a tumor sample isolated from said subject and sequencing a set of cancer-related genes from normal cells isolated from said subject. The tumor sample can be a solid tumor sample. The normal cells can be blood cells isolated from a blood sample from the subject. In step 120, sequence data from the tumor can be compared to sequence data from normal cells to generate a tumor-specific sequence profile. In some embodiments, the tumor-specific sequence profile comprises mutational status of one or more genes in the set. The method can further comprise generating a report describing the tumor-specific sequence profile. In some embodiments, the method further comprises choosing a subset of 2-4 genes known to harbor tumor-specific mutations for further monitoring. In step 130, cell-free DNA is obtained from a blood sample collected from the subject prior to treatment (e.g., tumor removal or therapeutic intervention) as well as prior to treatment (tumor removal or therapeutic intervention) as well as at a later time point. In step 140, the cell-free DNA from the blood sample is assayed for the 2-4 genes in the subset to obtain quantitative measurement of the tumor-specific mutations.

[0133] FIG. 2 is a depiction of an exemplary workflow of a method as described in FIG. 1, from steps 110-120, for sequencing a tumor cell and a normal cell in a subject.

[0134] The tumor sample is processed prior to sequencing by fixation in a formalin solution, followed by embedding in paraffin (e.g., is a FFPE sample). In other embodiments, the tumor sample is frozen prior to sequencing. In yet other embodiments, the tumor sample is neither fixed nor frozen. The unfixed, unfrozen tumor sample is stored in a storage solution configured for the preservation of nucleic acid at room temperature, as depicted in FIG. 3. The storage solution can be a commercially available storage solution. Exemplary storage solutions include, but are not limited to, DNA storage solutions from Biomatrica (see, e.g., WO/2012/018638, WO/2009/038853, US20080176209).

[0135] Further embodiments of the sequencing methods and assays for determining mutational status in the blood are described herein.

### Next-Generation Sequencing

[0136] In some embodiments, the tumor sample and normal cells from the subject are sequenced. In some embodiments, nucleic acid is isolated from the tumor sample and normal cells using any methods known in the art. The nucleic acid is DNA. The DNA from the tumor sample and normal cells can be used to prepare a subject-specific tumor DNA library and/or normal DNA library. DNA libraries can be used for sequencing by a sequencing platform. The sequencing platform can be a next-generation sequencing (NGS) platform. In some embodiments, the method further comprises sequencing the nucleic acid libraries using NGS technology. NGS technology can involve sequencing of clonally amplified DNA templates or single DNA molecules in a massively parallel fashion (e.g. as described in Volkerding et al. Clin Chem 55:641-658 [2009]; Metzker M Nature Rev 11:31-46 [2010]). In addition to high-throughput sequence information, NGS provides digital quantitative information, in that each sequence read is a countable “sequence tag” representing an individual clonal DNA template or a single DNA molecule.

### Next Generation Sequencing Platforms

[0137] The next-generation sequencing platform can be a commercially available platform. Commercially available platforms include, e.g., platforms for sequencing-by-synthesis, ion semiconductor sequencing, pyrosequencing, reversible dye terminator sequencing, sequencing by ligation, single-molecule sequencing, sequencing by hybridization, and nanopore sequencing. Platforms for sequencing by synthesis are available from, e.g., Illumina, 454 Life Sciences, Helicos Biosciences, and Qiagen. Illumina platforms can include, e.g., Illumina's Solexa platform, Illumina's Genome Analyzer, and are described in Gudmundsson et al (Nat. Genet. 2009 41:1122-6), Out et al (Hum. Mutat. 2009 30:1703-12) and Turner (Nat. Methods 2009 6:315-6), U.S. Patent Application Pub nos. US20080160580 and US20080286795, U.S. Pat. Nos. 6,306,597, 7,115,400, and 7232656. 454 Life Science platforms include, e.g., the GS Flex and GS Junior, and are described in U.S. Pat. No. 7,323,305. Platforms from Helicos Biosciences include the True Single Molecule Sequencing platform. Platforms for ion seminconductor sequencing include, e.g., the Ion Torrent Personal Genome Machine (PGM) and are described in U.S. Pat. No. 7,948,015. Platforms for pryosequencing include the GS Flex 454 system and are described in U.S. Pat. Nos. 7,211,390; 7,244,559; 7264929. Platforms and methods for sequencing by ligation include, e.g., the SOLiD sequencing platform and are described in U.S. Pat. No. 5,750,341. Platforms for single-molecule sequencing include the SMRT system from Pacific Bioscience and the Helicos True Single Molecule Sequencing platform.

[0138] While the automated Sanger method is considered as a ‘first generation’ technology, Sanger sequencing including the automated Sanger sequencing, can also be employed by the method of the invention. Additional sequencing methods that comprise the use of developing nucleic acid imaging technologies e.g. atomic force microscopy (AFM) or transmission electron microscopy (TEM), are also encompassed by the method of the invention. Exemplary sequencing technologies are described below.

[0139] The DNA sequencing technology can utilize the Ion Torrent sequencing platform, which pairs semiconductor technology with a sequencing chemistry to directly translate chemically encoded information (A, C, G, T) into digital information (0, 1) on a semiconductor chip. Without wishing to be bound by theory, when a nucleotide is incorporated into a strand of DNA by a polymerase, a hydrogen ion is released as a byproduct. The Ion Torrent platform detects the release of the hydrogen atom as a change in pH. A detected change in pH can be used to indicate nucleotide incorporation. The Ion Torrent platform comprises a high-density array of micro-machined wells to perform this biochemical process in a massively parallel way. Each well holds a different library member, which may be clonally amplified. Beneath the wells is an ion-sensitive layer and beneath that an ion sensor. The platform sequentially floods the array with one nucleotide after another. When a nucleotide, for example a C, is added to a DNA template and is then incorporated into a strand of DNA, a hydrogen ion will be released. The charge from that ion will change the pH of the solution, which can be identified by Ion Torrent's ion sensor. If the nucleotide is not incorporated, no voltage change will be recorded and no base will be called. If there are two identical bases on the DNA strand, the voltage will be double, and the chip will record two identical bases called. Direct identification allows recordation of nucleotide incorporation in seconds. Library preparation for the Ion Torrent platform generally involves ligation of two distinct adaptors at both ends of a DNA fragment.

[0140] The DNA sequencing technology utilizes an Illumina sequencing platform, which generally employs cluster amplification of library members onto a flow cell and a sequencing-by-synthesis approach. Cluster-amplified library members are subjected to repeated cycles of polymerase-directed single base extension. Single-base extension can involve incorporation of reversible-terminator dNTPs, each dNTP labeled with a different removable fluorophore. The reversible-terminator dNTPs are generally 3′ modified to prevent further extension by the polymerase. After incorporation, the incorporated nucleotide can be identified by fluorescence imaging. Following fluorescence imaging, the fluorophore can be removed and the 3′ modification can be removed resulting in a a 3′ hydroxyl group, thereby allowing another cycle of single base extension. Library preparation for the Illumina platform generally involves ligation of two distinct adaptors at both ends of a DNA fragment.

[0141] The DNA sequencing technology that is used in the method of the invention can be the Helicos True Single Molecule Sequencing (tSMS), which can employ sequencing-by-synthesis technology. In the tSMS technique, a polyA adaptor can be ligated to the 3′end of DNA fragments. The adapted fragments can be hybridized to poly-T oligonucleotides immobilized on the tSMS flow cell. The library members can be immobilized onto the flow cell at a density of about 100 million templates/cm2. The flow cell can be then loaded into an instrument, e.g., HeliScope™ sequencer, and a laser can illuminate the surface of the flow cell, revealing the position of each template. A CCD camera can map the position of the templates on the flow cell surface. The library members can be subjected to repeated cycles of polymerase-directed single base extension. The sequencing reaction begins by introducing a DNA polymerase and a fluorescently labeled nucleotide. The polymerase can incorporate the labeled nucleotides to the primer in a template directed manner. The polymerase and unincorporated nucleotides can be removed. The templates that have directed incorporation of the fluorescently labeled nucleotide can be discerned by imaging the flow cell surface. After imaging, a cleavage step can remove the fluorescent label, and the process can be repeated with other fluorescently labeled nucleotides until a desired read length is achieved. Sequence information can be collected with each nucleotide addition step.

[0142] The DNA sequencing technology can utilize a 454 sequencing platform (Roche) (e.g. as described in Margulies, M. et al. Nature 437:376-380 [2005]). 454 sequencing generally involves two steps. In a first step, DNA can be sheared into fragments. The fragments can be blunt-ended. Oligonucleotide adaptors can be ligated to the ends of the fragments. The adaptors generally serve as primers for amplification and sequencing of the fragments. At least one adaptor can comprise a capture reagent, e.g., a biotin. The fragments can be attached to DNA capture beads, e.g., streptavidin-coated beads. The fragments attached to the beads can be PCR amplified within droplets of an oil-water emulsion, resulting in multiple copies of clonally amplified DNA fragments on each bead. In a second step, the beads can be captured in wells, which can be pico-liter sized. Pyrosequencing can be performed on each DNA fragment in parallel. Pyrosequencing generally detects release of pyrophosphate (PPi) upon nucleotide incorporation. PPi can be converted to ATP by ATP sulfurylase in the presence of adenosine 5′ phosphosulfate. Luciferase can use ATP to convert luciferin to oxyluciferin, thereby generating a light signal that is detected. A detected light signal can be used to identify the incorporated nucleotide.

[0143] The DNA sequencing technology can utilize a SOLiD™ technology (Applied Biosystems). The SOLiD platform generally utilizes a sequencing-by-ligation approach. Library preparation for use with a SOLiD platform generally comprises ligation of adaptors are attached to the 5′ and 3′ ends of the fragments to generate a fragment library. Alternatively, internal adaptors can be introduced by ligating adaptors to the 5′ and 3′ ends of the fragments, circularizing the fragments, digesting the circularized fragment to generate an internal adaptor, and attaching adaptors to the 5′ and 3′ ends of the resulting fragments to generate a mate-paired library. Next, clonal bead populations can be prepared in microreactors containing beads, primers, template, and PCR components. Following PCR, the templates can be denatured. Beads can be enriched for beads with extended templates. Templates on the selected beads can be subjected to a 3′ modification that permits bonding to a glass slide. The sequence can be determined by sequential hybridization and ligation of partially random oligonucleotides with a central determined base (or pair of bases) that is identified by a specific fluorophore. After a color is recorded, the ligated oligonucleotide can be removed and the process can then be repeated.

[0144] The DNA sequencing technology can utilize a single molecule, real-time (SMRT™) sequencing platform (Pacific Biosciences). In SMRT sequencing, the continuous incorporation of dye-labeled nucleotides can be imaged during DNA synthesis. Single DNA polymerase molecules can be attached to the bottom surface of individual zero-mode wavelength identifiers (ZMW identifiers) that obtain sequence information while phospholinked nucleotides are being incorporated into the growing primer strand. A ZMW generally refers to a confinement structure which enables observation of incorporation of a single nucleotide by DNA polymerase against a background of fluorescent nucleotides that rapidly diffuse in an out of the ZMW on a microsecond scale. By contrast, incorporation of a nucleotide generally occurs on a milliseconds timescale. During this time, the fluorescent label can be excited to produce a fluorescent signal, which is detected. Detection of the fluorescent signal can be used to generate sequence information. The fluorophore can then be removed, and the process repeated. Library preparation for the SMRT platform generally involves ligation of hairpin adaptors to the ends of DNA fragments.

[0145] The DNA sequencing technology can utilize nanopore sequencing (e.g. as described in Soni GV and Meller A. Clin Chem 53: 1996-2001 [2007]). Nanopore sequencing DNA analysis techniques are being industrially developed by a number of companies, including Oxford Nanopore Technologies (Oxford, United Kingdom). Nanopore sequencing is a single-molecule sequencing technology whereby a single molecule of DNA is sequenced directly as it passes through a nanopore. A nanopore can be a small hole, of the order of 1 nanometer in diameter. Immersion of a nanopore in a conducting fluid and application of a potential (voltage) across can result in a slight electrical current due to conduction of ions through the nanopore. The amount of current which flows is sensitive to the size and shape of the nanopore and to occlusion by, e.g., a DNA molecule. As a DNA molecule passes through a nanopore, each nucleotide on the DNA molecule obstructs the nanopore to a different degree, changing the magnitude of the current through the nanopore in different degrees. Thus, this change in the current as the DNA molecule passes through the nanopore represents a reading of the DNA sequence.

[0146] The DNA sequencing technology can utilize a chemical-sensitive field effect transistor (chemFET) array (e.g., as described in U.S. Patent Application Publication No. 20090026082). In one example of the technique, DNA molecules can be placed into reaction chambers, and the template molecules can be hybridized to a sequencing primer bound to a polymerase. Incorporation of one or more triphosphates into a new nucleic acid strand at the 3′ end of the sequencing primer can be discerned by a change in current by a chemFET. An array can have multiple chemFET sensors. In another example, single nucleic acids can be attached to beads, and the nucleic acids can be amplified on the bead, and the individual beads can be transferred to individual reaction chambers on a chemFET array, with each chamber having a chemFET sensor, and the nucleic acids can be sequenced.

[0147] The DNA sequencing technology can utilize transmission electron microscopy (TEM). The method, termed Individual Molecule Placement Rapid Nano Transfer (IMPRNT), generally comprises single atom resolution transmission electron microscope imaging of high-molecular weight (150 kb or greater) DNA selectively labeled with heavy atom markers and arranging these molecules on ultra-thin films in ultra-dense (3 nm strand-to-strand) parallel arrays with consistent base-to-base spacing. The electron microscope is used to image the molecules on the films to determine the position of the heavy atom markers and to extract base sequence information from the DNA. The method is further described in PCT patent publication WO 2009/046445. The method allows for sequencing complete human genomes in less than ten minutes.

[0148] The method can utilize sequencing by hybridization (SBH). SBH generally comprises contacting a plurality of polynucleotide sequences with a plurality of polynucleotide probes, wherein each of the plurality of polynucleotide probes can be optionally tethered to a substrate. The substrate might be flat surface comprising an array of known nucleotide sequences. The pattern of hybridization to the array can be used to determine the polynucleotide sequences present in the sample. In other embodiments, each probe is tethered to a bead, e.g., a magnetic bead or the like. Hybridization to the beads can be identified and used to identify the plurality of polynucleotide sequences within the sample.

[0149] The length of the sequence read can vary depending on the particular sequencing technology utilized. NGS platforms can provide sequence reads that vary in size from tens to hundreds, or thousands of base pairs. In some embodiments of the method described herein, the sequence reads are about 20 bases long, about 25 bases long, about 30 bases long, about 35 bases long, about 40 bases long, about 45 bases long, about 50 bases long, about 55 bases long, about 60 bases long, about 65 bases long, about 70 bases long, about 75 bases long, about 80 bases long, about 85 bases long, about 90 bases long, about 95 bases long, about 100 bases long, about 110 bases long, about 120 bases long, about 130, about 140 bases long, about 150 bases long, about 200 bases long, about 250 bases long, about 300 bases long, about 350 bases long, about 400 bases long, about 450 bases long, about 500 bases long, about 600 bases long, about 700 bases long, about 800 bases long, about 900 bases long, about 1000 bases long, or more than 1000 bases long.

[0150] Partial sequencing of DNA fragments present in the sample can be performed, and sequence tags comprising reads that map to a known reference genome can be counted. Only sequence reads that uniquely align to the reference genome can be counted as sequence tags. In one embodiment, the reference genome is the human reference genome NCBI36/hgl 8 sequence, which is available on the world wide web at genome.ucsc.edu/cgi-bin/hgGateway?org=Human&db=hgl 8&hgsid=166260105). Other sources of public sequence information include GenBank, dbEST, dbSTS, EMBL (the European Molecular Biology Laboratory), and the DDBJ (the DNA Databank of Japan). The reference genome can also comprise the human reference genome NCBI36/hgl 8 sequence and an artificial target sequences genome, which includes polymorphic target sequences e.g. a SNP genome comprising SEQ ID NOs: 1-56. In yet another embodiment, the reference genome is an artificial target sequence genome comprising polymorphic target sequences.

[0151] Mapping of the sequence tags can be achieved by comparing the sequence of the tag with the sequence of the reference genome to determine the chromosomal origin of the sequenced nucleic acid (e.g. cell free DNA) molecule, and specific genetic sequence information is not needed. A number of computer algorithms are available for aligning sequences, including without limitation BLAST (Altschul et al., 1990), BLITZ (MPsrch) (Sturrock & Collins, 1993), FASTA (Person & Lipman, 1988), BOWTIE (Langmead et al, Genome Biology 10:R25.1-R25.10 [2009]), or ELAND (Illumina, Inc., San Diego, Calif., USA). In one embodiment, one end of the clonally expanded copies of the DNA molecule is sequenced and processed by bioinformatic alignment analysis for the Illumina Genome Analyzer, which uses the Efficient Large-Scale Alignment of Nucleotide Databases (ELAND) software. Additional software includes SAMtools (SAMtools, Bioinformatics, 2009, 25(16):2078-9), and the Burroughs-Wheeler block sorting compression procedure which involves block sorting or preprocessing to make compression more efficient.

[0152] The sequencing platforms described herein generally comprise a solid support immobilized thereon surface-bound oligonucleotides which allow for the capture and immobilization of sequencing library members to the solid support. Surface bound oligonucleotides generally comprise sequences complementary to the adaptor sequences of the sequencing library.

[0153] The DNA samples can be used to prepare nucleic acid libraries for sequencing. Preparation of nucleic acid libraries can comprise any method known in the art or as described herein. As used herein, the terms “library” or “sequencing library” are used interchangeably herein and can refer to a plurality of nucleic acid fragments obtained from a biological sample. Generally, the fragments are modified with an adaptor sequence which affects coupling (e.g., capture and/or immobilization) of the fragments to a sequencing platform. An adaptor sequence can comprise a defined oligonucleotide sequence that affects coupling of a library member to a sequencing platform. By way of example only, the adaptor can comprise a sequence that is at least 25% complementary or identical to an oligonucleotide sequence immobilized onto a solid support (e.g., a sequencing flow cell or bead). An adaptor sequence can comprise a defined oligonucleotide sequence that is at least 70% complementary or identical to a sequencing primer. The sequencing primer can enable nucleotide incorporation by a polymerase, wherein incorporation of the nucleotide is monitored to provide sequencing information. The sequencing primer can be about 15-25 bases. In some embodiments, the sequencing primer is conjugated to the 3′ end of the adaptor. In some embodiments, an adaptor comprises a sequence that is at least 25% complementary or identical to an oligonucleotide sequence immobilized onto a solid support and a sequence that is at least 70% complementary or identical to a sequencing primer. Coupling can also be achieved through serially stitching adaptors together. The number of adaptors that can be stitched can be 1, 2, 3, 4 or more. The stitched adaptors can be at least 35 bases, 70 bases, 105 bases, 140 bases or more.

[0154] The adaptor can comprise a barcode sequence. At least 50%, 60%, 70%, 80%, 90%, or 100% of sequencing library members in a library can comprise the same adaptor sequence. At least 50%, 60%, 70%, 80%, 90%, or 100% of the ssDNA library members can comprise an adaptor sequence at a first end but not at a second end. In some embodiments, the first end is a 5′ end. In some embodiments, the first end is at 3′ end. The adaptor sequence can be chosen by a user according to the sequencing platform used for sequencing. By way of example only, an Illumina sequencing by synthesis platform comprises a solid support with a first and second population of surface-bound oligonucleotides immobilized thereon. Such oligonucleotides comprise a sequence for hybridizing to a first and second Illumina-specific adaptor oligonucleotide and priming an extension reaction. Accordingly, a DNA library member can comprise a first Illumina-specific adaptor that is partially or wholly complementary to a first population of surface bound oligonucleotides of an Illumina system. By way of other example only, the SOLiD system, and Ion Torrent, GS FLEX system comprises a solid support in the form of a bead with a single population of surface bound oligonucleotides immobilized thereon. Accordingly, in some embodiments the ssDNA library member comprises an adaptor sequence that is complementary to a surface-bound oligonucleotide of a SOLiD system, Ion Torrent system, or GS Flex system.

[0155] Accordingly, in one aspect, the invention provides improved methods of preparing a nucleic acid library. The nucleic acid library can be a DNA library. The method can comprise ligation of adaptor sequences to DNA fragments. The method can improve efficiency of adaptor ligation by at least 10-fold. In some embodiments, the nucleic acid library is a ssDNA library. In some embodiments, the nucleic acid library is a partial ssDNA library.

ssDNA Fragment/ssDNA Library Preparation

[0156] In some embodiments, the ssDNA fragment is a member of a ssDNA library. The single-stranded nucleic acid library is prepared from a sample of double-stranded nucleic acid using any means known in the art or described herein.

[0157] The starting sample can be a biological sample obtained from a subject. Exemplary subjects and biological samples are described herein.

[0158] The nucleic acid sample can be enriched for target polynucleotides. Target enrichment can be by any means known in the art. For example, the nucleic acid sample may be enriched by amplifying target sequences using target-specific primers. The target amplification can occur in a digital PCR format, using any methods or systems known in the art. The nucleic acid sample may be enriched by capture of target sequences onto an array immobilized thereon target-selective oligonucleotides. The nucleic acid sample may be enriched by hybridizing to target-selective oligonucleotides free in solution. The oligonucleotides may comprise a capture moiety which enables capture by a capture reagent. Exemplary capture moieties and capture reagents are described herein. In some embodiments, the nucleic acid sample is not enriched for target polynucleotides, e.g., represents a whole genome.

[0159] Accordingly, in some aspects the invention provides a method of preparing a ssDNA library. The method can comprise denaturing a double stranded DNA fragment into ssDNA fragments, ligating a primer docking sequence onto one end of the ssDNA fragment, hybridizing a primer to the primer docking sequence. The primer can comprise at least a portion of an adaptor sequence that couples to a next-generation sequencing platform. The method can further comprise extension of the hybridized primer to create a duplex, wherein the duplex comprises the original ssDNA fragment and an extended primer strand. The extended primer strand can be separated from the original ssDNA fragment. The extended primer strand can be collected, wherein the extended primer strand is a member of the ssDNA library.

[0160] dsDNA can be fragmented by any means known in the art or as described herein. dsDNA can be fragmented, for example, by mechanical shearing, by nebulization, or by sonication.

[0161] In some embodiments, cDNA is generated from RNA using random primed reverse transcription (RNaseH+) to generate randomly sized cDNA.

[0162] The dsDNA fragments or randomly sized cDNA can be less than 1000 bp, less than 800 bp, less than 700 bp, less than 600 bp, less than 500 bp, less than 400 bp, less than 300 bp, less than 200 bp, or less than 100 bp. The DNA fragments can be about 40-100 bp, about 50-125 bp, about 100-200 bp, about 150-400 bp, about 300-500 bp, about 100-500, about 400-700 bp, about 500-800 bp, about 700-900 bp, about 800-1000 bp, or about 100-1000 bp.

[0163] The ends of DNA fragments can be polished (e.g., blunt-ended). The ends of DNA fragments can be polished by treatment with a polymerase. Polishing can involve removal of 3′ overhangs, fill-in of 5′ overhangs, or a combination thereof. The polymerase can be a proof-reading polymerase (e.g., comprising 3′ to 5′ exonuclease activity). The proofreading polymerase can be, e.g., a T4 DNA polymerase, Pol 1 Klenow fragment, or Pfu polymerase. Polishing can comprise removal of damaged nucleotides (e.g. abasic sites), using any means known in the art.

[0164] Ligation of an adaptor to a 3′ end of a DNA fragment can comprise formation of a bond between a 3′ OH group of the fragment and a 5′ phosphate of the adaptor. Therefore, removal of 5′ phosphates from DNA fragments can minimize aberrant ligation of two library members. Accordingly, in some embodiments, 5′ phosphates are removed from DNA fragments. In some embodiments, 5′ phosphates are removed from at least 50%, 55%, 60%, 65%, 70%, 75%, 80%, 85%, 90%, 95%, or greater than 95% of DNA fragments in a sample. In some embodiments, substantially all phosphate groups are removed from DNA fragments. In some embodiments, substantially all phosphates are removed from at least 50%, 55%, 60%, 65%, 70%, 75%, 80%, 85%, 90%, 95%, or greater than 95% of DNA fragments in a sample. Removal of phosphate groups from a DNA sample can be by any means known in the art. Removal of phosphate groups can comprise treating the sample with heat-labile phosphatase. In some embodiments, phosphate groups are not removed from the DNA sample. In some embodiments ligation of an adaptor to the 5′ end of the DNA fragment is performed.

### Denaturation

[0165] ssDNA can be prepared from dsDNA fragments prepared by any means in the art or as described herein, by denaturation into single strands. Denaturation of dsDNA can be by any means known in the art, including heat denaturation, incubation in basic pH, denaturation by urea or formaldehyde.

[0166] Heat denaturation can be achieved by heating a dsDNA sample to about 60 deg C. or above, about 65 deg C. or above, about 70 deg C. or above, about 75 deg C. or above, about 80 deg C. or above, about 85 deg C. or above, about 90 deg C. or above, about 95 deg C. or above, or about 98 deg C. or above. The dsDNA sample can be heated by any means known in the art, including, e.g., incubation in a water bath, a temperature controlled heat block, a thermal cycler. In some embodiments the sample is heated for 0.5, 1, 2, 3, 4, 5, 6, 7, 8, 9, 10, or more than 10 minutes.

[0167] Denaturation by incubation in basic pH can be achieved by, for example, incubation of a dsDNA sample in a solution comprising sodium hydroxide (NaOH) or potassium hydroxide (KOH). The solution can comprise about 1 mM NAOH, 2 mM NAOH, 5 mM NAOH, 10 mM NAOH, 20 mM NAOH, 40 mM NAOH, 60 mM NAOH, 80 mM NAOH, 100 mM NAOH, 0.2M NaOH, about 0.3M NaOH, about 0.4M NaOH, about 0.5M NaOH, about 0.6M NaOH, about 0.7M NaOH, about 0.8M NaOH, about 0.9M NaOH, about 1.0M NaOH, or greater than 1.0M NaOH. The solution can comprise about 1 mM KOH, 2 mM KOH, 5 mM KOH, 10 mM KOH, 20 mM KOH, 40 mM KOH, 60 mM KOH, 80 mM KOH, 100 mM KOH, 0.2M KOH, 0.5M KOH, 1M KOH, or greater than 1M KOH. In some embodiments, the dsDNA sample is incubated in NaOH or KOH for 0.5., 1, 2, 3, 4, 5, 6, 7, 8, 9, 10, 15, 20, 30, 40, 50, 60, or more than 60 minutes. The dsDNA can be incubated in Na-acetate following NaOH or KOH incubation.

[0168] Compounds like urea and formamide contain functional groups that can form H-bonds with the electronegative centers of the nucleotide bases. At high concentrations (e.g., 8M urea or 70% formamide) of the denaturant, the competition for H-bonds favors interactions between the denaturant and the N-bases rather than between complementary bases, thereby separating the two strands.

### Ligation of Primer-Docking Oligonucleotide.

[0169] A primer-docking oligonucleotide (pdo) can be ligated onto one end of a ssDNA fragment. The pdo can be ligated onto a 5′ end or a 3′ end. In some embodiments, the pdo is ligated onto a 3′ end of the ssDNA fragment.

[0170] The pdo generally comprises a sequence that acts as a template for annealing a primer. The sequence of the pdo can comprise a sequence that is at least 70% complementary to a portion or all of an adaptor sequence for coupling to an NGS platform (NGS adaptor). The pdo can comprise a sequence complementary or identical to 5, 6, 7, 8, 9, 10, 11, 12, 13, 14, 15, 20, or more than 20 contiguous nucleotides of an NGS adaptor. In some embodiments, the pdo does not comprise a sequence complementary to a portion or all of an NGS adaptor.

[0171] The pdo can be adenylated at a 5′ end. The pdo can be is conjugated to a capture moiety that is capable of forming a complex with a capture reagent. The capture moiety can be conjugated to the adaptor oligonucleotide by any means known in the art. Capture moiety/capture reagent pairs are known in the art. In some embodiments the capture reagent is avidin, streptavidin, or neutravidin and the capture moiety is biotin. In another embodiment the capture moiety/capture reagent pair is digoxigenin/wheat germ agglutinin.

[0172] Ligation of the pdo to the ssDNA fragment can be effected by an ATP-dependent ligase. In some embodiments, the ATP-dependent ligase is an RNA ligase. The RNA ligase can be an ATP dependent ligase. The RNA ligase can be an Rnl 1 or Rnl 2 family ligase. Generally, Rnl 1 family ligases can repair single-stranded breaks in tRNA. Exemplary Rnl 1 family ligases include, e.g., T4 RNA ligase, thermostable RNA ligase 1 from Thermus scitoductus bacteriophage TS2126 (CircLigase), or CircLigase II. These ligases generally catalyze the ATP-dependent formation of a phosphodiester bond between a nucleotide 3-OH nucleophile and a 5′ phosphate group. Generally, Rnl 2 family ligases can seal nicks in duplex RNAs. Exemplary Rnl 2 family ligases include, e.g., T4 RNA ligase 2. The RNA ligase can be an Archaeal RNA ligase, e.g., an archaeal RNA ligase from the thermophilic archaeon Methanobacterium thermoautotrophicum (MthRnl).

[0173] The ligation of the pdo's to the single-stranded nucleic acid fragment can comprise preparing a reaction mixture comprising an ssDNA fragment, a pdo, and ligase. In some embodiments the reaction mixture is heated to effect ligation of the adaptor oligonucleotides to the ss DNA fragments. In some embodiments the reaction mixture is heated to about 50 deg C., about 55 deg C., about 60 deg C., about 65 deg C., about 70 deg C., or above 70 deg C. In some embodiments the reaction mixture is heated to about 60-70 deg C. The reaction mixture can be heated for a sufficient time to effect ligation of the pdo to the ssDNA fragment. In some embodiments, the reaction mixture is heated for about 5 min, about 10 min, about 15 min, about 20 min, about 25 min, about 30 min, about 35 min, about 40 min, about 45 min, about 50 min, about 55 min, about 60 min, about 70 min, about 80 min, about 90 min, about 120 min, about 150 min, about 180 min, about 210 min, about 240 min, or more than 240 min.

[0174] In some embodiments the pdo's are present in the reaction mixture in a concentration that is greater than the concentration of ssDNA fragments in the mixture. In some embodiments, the pdo's are present at a concentration that is at least 10%, 20%, 30%, 40%, 60%, 60%, 70%, 80%, 90%, 100% or more than 100% greater than the concentration of ssDNA fragments in the mixture. The pdo's can be present at concentration that is at least 10-fold, 100-fold, 1000-fold, or 10000-fold greater than the concentration of ssDNA fragments in the mixture. The pdo's can be present at a final concentration of 0.1 uM, 0.5 uM, 1 uM, 10 uMor greater. In some embodiments the ligase is present in the reaction mixture at a saturating amount.

[0175] The reaction mixture can additionally comprise a high molecular weight inert molecule, e.g., PEG of MW 4000, 6000, or 8000. The inert molecule can be present in an amount that is about 0.5%, 1%, 2%, 3%, 4%, 5%, 7.5%, 10%, 12.5%, 15%, 17.5%, 20%, 25%, 30%, 35%, 40%, 45%, 50%, or greater than 50% weight/volume. In some embodiments, the inert molecular is present in an amount that is about 0.5-2%, about 1-5%, about 2-15%, about 10-20%, about 15-30%, about 20-50%, or more than 50% weight/volume.

[0176] After sufficient time has occurred to effect ligation of adaptors to the ss nucleic acid molecules, unreacted adaptors can be removed by any means known in the art, e.g., filtration by molecular weight cutoff, size exclusion chromatography, use of a spin column, selective precipitation with polyethylene glycol (PEG), selective precipitation with PEG onto a silica matrix, alcohol precipitation, sodium acetate precipitation, PEG and salt precipitation, or high stringency washing.

[0177] In some embodiments, the method further comprises capturing the ligated ssDNA fragment. Capturing of the ligated ssDNA fragment can occur prior to extension or subsequent to extension. The ligated ssDNA fragment can be captured onto a solid support. Capturing can involve the formation of a complex comprising a capture moiety conjugated to a pdo and a capture reagent. In some embodiments, the capture reagent is immobilized onto a solid support. In some embodiments the solid support comprises an excess of capture reagent as compared to the amount of ligated ssDNA comprising the capture moiety. In some embodiments the solid support comprises 5-fold, 10-fold, or 100-fold more available binding sites that the total number of ligated ssDNA fragments comprising the capture moiety.

### Extension

[0178] In some embodiments, a primer is hybridized to the ligated ssDNA fragment via the pdo. The primer can comprise a portion or entirety of an NGS adaptor sequence. Exemplary NGS adaptor sequences are described herein. In some embodiments, the primer is extended to create a duplex comprising the original ssDNA fragment and the extended primer, wherein the extended primer comprises a reverse complement of the original ssDNA fragment and an NGS adaptor sequence at one end. In some embodiments the NGS adaptor is at the 5′ end. Exemplary NGS adaptor sequences are described herein. In some embodiments, the NGS adaptor sequence comprises a sequence that is at least 70% identical to a surface-bound oligonucleotide of an NGS platform. In some embodiments, the NGS adaptor sequence comprises a sequence that is at least 70% complementary to a surface-bound oligonucleotide of an NGS platform. In some embodiments, the NGS adaptor sequence comprises a sequence that is at least 70% identical to a sequencing primer for use by an NGS platform. In some embodiments, the NGS adaptor sequence comprises a sequence that is at least 70% complementary to a sequencing primer for use by an NGS platform. Extension can be effected by a proofreading mesophilic DNA polymerase. Preferably, the polymerase is a thermophilic polymerase with 5′-3′ exonucleolytic/endonucleolytic (DNA polymerases I, II, III) or 3′-5′ exonucleolytic (family A or B DNA polymerases, DNA polymerase I, T4 DNA polymerase) activity. In some instances, the polymerase can have no exonuclease activity (Taq) In some cases, the polymerase effects linear amplification of the immobilized ligated fragment, creating a plurality of copies of the reverse complement of the immobilized ligated fragment. In other cases only one copy of the reverse complement is created. In some embodiments, the extended primer molecules are separated from the original ssDNA template (e.g., by denaturation as described herein). The extended primer molecules are free in solution while the original ssDNA template molecules remain immobilized to the solid support. The extended primer molecules can be easily harvested, resulting in a ssDNA library preparation in which most of the library members comprise an NGS adaptor. At least 50%, 60%, 70%, 80%, 90%, more than 90%, or substantially all of the library members can comprise an NGS adaptor.

[0179] An exemplary workflow for preparing a ssDNA library is outlined below.

[0180] FIG. 4 depicts an exemplary embodiment of the method for preparing an ssDNA library from DNA isolated from a biological sample (e.g., a blood, plasma, urine, stool, mucosal sample). The DNA obtained is fragmented by enzymatic or mechanical means to 100-1000, but preferably 100-500 bp fragments. The DNA can be fragmented in situ. DNA can be fragmented from formalin-fixed paraffin-embedded (FFPE) tissues or circulating DNA. DNA can be isolated from FFPE and circulating by kits (Qiagen, Covaris). In some embodiments, the DNA is cDNA generated from RNA isolated from a biological sample from the same samples using random primed reverse transcription (RNaseH+) to generate randomly sized cDNA.

[0181] In step 1, fragmented DNA can be treated with a base exicision repair enzyme (Endo VIII, formamidopyrimidine DNA glycosylase (FPG)) to excise damaged bases that can interfere with polymerization. DNA can then be treated with a proof-reading polymerase (e.g. T4 DNA polymerase) to polish ends and replace damaged nucleotides (e.g. abasic sites) and a heat-labile phosphatase to remove all phosphate groups from DNA. The reaction mixture is heated to 80 deg C. for 10 min to inactivate the phosphatase and polymerase and denature double stranded DNA to single strands.

[0182] In step 2, a chemically or enzymatically phosphorylated pdo containing a 3′-end affinity tag (e.g. biotin) 12 to 50 bases in length can be ligated to the fragmented single-strand DNA library at a final concentration of 0.5 uM or greater with saturating amount of ATP-dependent RNA ligase (T4 RNA ligase, but preferably thermophillic such as CircLigase, CircLigase II) in the presence of 10-20% (w/v) polyethylene glycol of average molecular weight 4000, 6000, or 8000. The reaction is incubated for 1 hr @ 60-70C The pdo can comprise the following: (i) all, part or none of the sequence corresponding to a surface-bound oligonucleotide for Illumina flow cell cluster generation (ii) a 3′-end affinity group that is incapable of participating in the ligation reaction that is linked to the oligonucleotide at a sufficient distance (10 atoms or greater) to minimize steric hindrance of the interaction between the affinity ligand and the bound receptor.

[0183] The pdo can be adenlyated by any means known in the art. If an adenlyated adaptor is used, in some embodiments the ATP-dependent RNA ligase is not CircLigase or CircLigase II. The reaction is purified by size to remove unreacted adaptor. This can be achieved through the use of a microfiltration unit with a molecular size cutoff of 10K or 3K (e.g. microcon YM-10 or YM3, or nanosep omega). Alternatively, adaptor removal can be achieved through passage through a size exclusion desalting column (agarose, polyacrylamide) with a size exclusion cutoff of 10K or less, through the use of a spin column, through selective precipitation with PEG, alcohol or salt, high stringency washing, or denaturing gel electrophoresis.

[0184] In step 6 an oligonucleotide primer either fully complementary to the adaptor or partially complementary to the adaptor at its 3′-end, but fully possessing the sequence corresponding to the Illumina flow-cell oligonucleotides, is then used to create a reverse complement of the bound library using a proofreading mesophilic DNA polymerase. Preferably, a thermophilic polymerase with 5′-3′ exonucleolytic/endonucleolytic (DNA polymerase I) or 3′-5′ exonucleolytic (family A or B DNA polymerases, Vent, Phusion, Pfu and their variants) activity is used to permit linear amplification of the library.

[0185] In step 7 the recovered material is then bound to an affinity resin or support capable of binding to the 3′-end affinity tag in batch mode. The recovered material put into a pre-rinsed support in a 0.2 ml tube containing at least 10-fold excess and preferably 100-fold more available binding sites that the total number of tagged adaptor molecules.

[0186] In step 8 the supernatant consisting of copies of the bound library is then harvested and quantified.

[0187] FIG. 5 is a depiction of an exemplary workflow as described in FIG. 4. In step 510 dsDNA is fragmented. In step 520 dsDNA fragments are dephosphorylated and heat-denatured into single strands. In step 530 biotinylated pdo's comprising a primer-docking sequence 531 are contacted with the ssDNA fragments. In step 540 the pdo's are ligated to the 3′ ends of the ssDNA fragments to create library member precursors. In step 550 primers comprising sequence complementary to the pdo 551 and adaptor sequence 552 are hybridized in step 560 to the ssDNA via the pdos. In step 560 the hybridized primers are extended along the template ssDNA fragments to create duplexes. The duplexes are immobilized onto a solid support (e.g., streptavidin coated beads). Heat denaturation releases the final library members into solution while retaining the original ssDNA fragment on the bead.

Alternative Embodiments of ssDNA Library Preparation.

[0188] In another aspect, the invention provides a method of preparing a ssDNA library, comprising denaturing dsDNA fragments into ssDNA, and ligating adaptor sequences to both ends of the ssDNA molecules. Methods of fragmenting dsDNA is described herein. Methods of denaturing dsDNA fragments are described herein.

[0189] The method can comprise ligating a first adaptor that comprises a sequence that is at least 70% complementary or identical to a first surface-bound oligonucleotide. The first surface-bound oligonucleotide can be an NGS platform-specific surface bound oligonucleotide. The first adaptor can comprise a sequence complementary or identical to 5, 6, 7, 8, 9, 10, 11, 12, 13, 14, 15, 20, or more than 20 contiguous nucleotides of the surface-bound oligonucleotide. The first adaptor can further comprise a sequence that is at least 70% complementary to a first sequencing primer. In some embodiments the first adaptor is ligated to a 3′ end of an ssDNA fragment using a method described herein or any method known in the art. In some embodiments, the ssDNA fragment lacks 5′ phosphate groups. In particular embodiments, the first adaptor is ligated to the 3′ end of the ssDNA fragment by an ATP-dependent ligase. In other embodiments, the first adaptor comprises a 3′ terminal blocking group. Generally, the 3′ terminal blocking group will prevent the formation of a covalent bond between the 3′ terminal base and another nucleotide. In some embodiments, the 3′ terminal blocking group is dideoxy-dNTP or biotin. The first adaptor can be 5′ adenylated. In some embodiments, the first adaptor is ligated to a 3′ end of an ssDNA fragment by an RNA ligase as described herein. The RNA ligase can be truncated or mutated RNA ligase 2 from T4 or Mth. The method can further comprises ligating a second adaptor sequence to a 5′ end of the ssDNA fragment. The second adaptor sequence can be distinct from the first adaptor sequence. The second adaptor sequence can comprise a sequence that is at least 70% complementary to a second surface-bound oligonucleotide. The second surface-bound oligonucleotide can be an NGS platform-specific surface bound oligonucleotide. The second adaptor can comprise a sequence complementary or identical to 5, 6, 7, 8, 9, 10, 11, 12, 13, 14, 15, 20, or more than 20 contiguous nucleotides of the surface-bound oligonucleotide. The second adaptor can further comprise a sequence that is at least 70% complementary to a second sequencing primer. In some embodiments the second adaptor is ligated to the ssDNA fragment using RNA ligase, e.g., CircLigase as described herein. In some embodiments, the first and second adaptor are both at least 70% complementary to the first and second surface-bound oligonucleotides. In other embodiments, the first and second adaptor are both at least 70% identical to the first and second surface-bound oligonucleotides.

[0190] The ssDNA library produced using methods described herein can be used for whole genome sequencing or targeted sequencing. In some embodiments, the ssDNA library produced using methods described herein are enriched for target polynucleotides of interest prior to sequencing.

### Target Enrichment

[0191] In another aspect, the invention provides a method for preparing a target-enriched DNA library. The method can involve hybridizing a target-selective oligonucleotide (TSO) to a single stranded DNA (ssDNA) fragment to create a hybridization product, and amplifying the hybridization product in a single round of amplification to create an extension strand.

[0192] The method of target enrichment is as described in US. Patent Application Pub. No. 20120157322, hereby incorporated by reference.

[0193] The hybridizing and amplifying can occur in a reaction mixture. The term “reaction mixture” as used herein generally refers to a mixture of components necessary to amplify at least one amplicon from nucleic acid template molecules. The mixture may comprise nucleotides (dNTPs), a polymerase and a target-selective oligonucleotide. In some embodiments, the mixture comprises a plurality of target-selective oligonucleotides. The mixture may further comprise a Tris buffer, a monovalent salt, and Mg2+. The concentration of each component is well known in the art and can be further optimized by an ordinary skilled artisan. The reaction mixture can also comprise additives including, but not limited to, non-specific background/blocking nucleic acids (e.g., salmon sperm DNA), biopreservatives (e.g. sodium azide), PCR enhancers (e.g. Betaine, Trehalose, etc.), and inhibitors (e.g. RNAse inhibitors). In some embodiments, a nucleic acid sample (e.g., a sample comprising an ssDNA fragment) is admixed with the reaction mixture. Accordingly, in some embodiments the reaction mixture further comprises a nucleic acid sample.

[0194] The ssDNA fragment can be a member of an ssDNA library. The ssDNA library can be prepared using a method as described herein. The ssDNA fragment can comprise a first single-stranded adaptor sequence located at a first end but not at a second end. In some embodiments, the first end is a 5′ end. In some embodiments, the TSO comprises a second single-stranded adaptor sequence located at a first end but not a second end. he first end can be a 5′ end. In some embodiments, the first adaptor sequence comprises a sequence that is at least 70% identical to a first surface-bound oligonucleotide. In some embodiments, the first adaptor sequence comprises a sequence that is at least 70% identical to a sequencing primer. In some embodiments the first adaptor further comprises a barcode sequence. In some embodiments, the second adaptor comprises a sequence that is at least 70% identical to a second surface-bound oligonucleotide. In some embodiments, the second adaptor comprises a sequence that is at least 70% identical to a sequencing primer

[0195] The target-selective oligonucleotide (tso) can be designed to at least partially hybridize to a target polynucleotide of interest. In some embodiments, the tso is designed to selectively hybridize to the target polynucleotide. The tso can be at least about 70%, 75%, 80%, 85%, 90%, 95%, or more than 95% complementary to a sequence in the target polynucleotide. In some embodiments, the tso is 100% complementary to a sequence in the target polynucleotide. The hybridization can result in a tso/target duplex with a Tm. The Tm of the tso/target duplex can be between 0-100 deg C., between 20-90 deg C., between 40-80 deg C., between 50-70 deg C., or between 55-65 deg C. The tso generally is sufficiently long to prime the synthesis of extension products in the presence of a polymerase. The exact length and composition of a tso can depend on many factors, including temperature of the annealing reaction, source and composition of the primer, and ratio of primer:probe concentration. The tso can be, for example, 8-50, 10-40, or 12-24 nucleotides in length.

### Amplification

[0196] The method can comprise amplification of the target in the reaction mixture. The amplification can be primed by a tso in a tso/target duplex. In some embodiments amplification is carried out utilizing a nucleic acid polymerase. The nucleic acid polymerase can be a DNA polymerase. In particular embodiments, the DNA polymerase is a thermostable DNA polymerase. The polymerase can be a member of A or B family DNA proofreading polymerases (Vent, Pfu, Phusion, and their variants), a DNA polymerase holoenzyme (DNA pol III holoenzyme), a Taq polymerase, or a combination thereof.

[0197] Amplification can be carried out as an automated process wherein the reaction mixture comprising template DNA is cycled through a denaturing step, a reporter probe and primer annealing step, and a synthesis step, whereby cleavage and displacement occurs simultaneously with primer-dependent template extension. The automated process may be carried out using a PCR thermal cycler. Commercially available thermal cycler systems include systems from Bio-Rad Laboratories, Life technologies, Perkin-Elmer, among others. In some embodiments, one cycle of amplification is performed.

[0198] Amplification of the tso/target duplex can result in an extension product comprising the original ssDNA fragment comprising the target sequence, and an extended strand comprising the second adaptor sequence, the tso, a reverse complement of the target sequence, and a reverse complement of the first adaptor sequence. If the first adaptor sequence of the original ssDNA fragment was 70% or more identical to a first surface-bound oligonucleotide, then the extended strand would comprise a first adaptor sequence that is 70% or more complementary to the first surface-bound oligonucleotide, and thereby would be hybridizable to the first surface-bound oligonucleotide. The extended strands, can comprise the target-enriched library.

[0199] The extension products in the reaction mixture can be denatured. The denatured extension products can be contacted with a surface immobilized thereon at least a first surface-bound oligonucleotide. In some embodiments, the extended strand is captured by the first surface-bound oligonucleotide, which can anneal to the first adaptor sequence on the extended strand.

[0200] The first surface-bound oligonucleotide can prime the extension of the captured extended strand. In some embodiments, extension of the captured extended strand results in a captured extension product. The captured extension product comprises the first surface bound oligonucleotide, the target sequence, and a second adaptor sequence that is at least 70% or more complementary to a second surface-bound oligonucleotide.

[0201] In some embodiments, the captured extension product hybridizes to the second surface-bound oligonucleotide, forming a bridge. In some embodiments, the bridge is amplified by bridge PCR. Bridge PCR methods can be carried out using methods known to the art.

### Kits for Library Preparation and Target Enrichment

[0202] Also provided are kits for practicing a method of library preparation as described herein or target-enrichment as described herein.

[0203] In one aspect, the invention provides kits for preparing a ssDNA library. In one embodiment, the kit comprises a pdo as described herein. In some embodiments, the kit comprises instructions, e.g., instructions for ligating a pdo to an ssDNA fragment. The kit can further comprise a ligase. The ligase can be an Rnl 1 or Rnl 2 family ligase, as described herein. The kit can further comprise a primer which can hybridize to the pdo. Primers hybridizable to the pdo are described herein. In some embodiments, the kit provides a solid support, e.g., a bead immobilized thereon a capture reagent. In some embodiments, the kit provides a polymerase for conducting an extension reaction. In some embodiments, the kit provides dNTPs for conducting an extension reaction.

[0204] In another embodiment, the kit comprises a first adaptor oligonucleotide that comprises sequence that is at least 70% complementary to a first support-bound oligonucleotide coupled to a sequencing platform, a second adaptor oligonucleotide that comprises a sequence that is distinct from the first adaptor, an RNA ligase, and instructions for use, e.g., instructions for practicing a method of the invention. In some embodiments, the first adaptor comprises a 3′ terminal blocking group that prevents the formation of a covalent bond between the 3′ terminal base and another nucleotide. 3′ terminal blocking groups are described herein. In some embodiments, the first is 5′ adenylated. In some embodiments, the first adaptor comprises a sequence that is at least 70% complementary to a sequencing primer. In some embodiments, the second adaptor comprises a sequence that is at least 70% complementary to a sequencing primer. In some embodiments, the second adaptor comprises a sequence that is at least 70% complementary to a second support-bound oligonucleotide coupled to a sequencing platform.

[0205] The invention provides kits for preparing a target-enriched DNA library. In some embodiments, the kit comprises a pdo, a ligase, a primer which can hybridize to the pdo, a solid support comprising a capture reagent, a polymerase, dNTPs, or any combination thereof. In some embodiments the kit further comprises a tso. The tso can be immobilized on a solid support coupled for sequencing on an NGS platform, as described in US Patent Application Pub No. 20120157322, hereby incorporated by reference.

[0206] In some embodiments, kits of the invention include a packaging material. As used herein, the term “packaging material” can refer to a physical structure housing the components of the kit. The packaging material can maintain sterility of the kit components, and can be made of material commonly used for such purposes (e.g., paper, corrugated fiber, glass, plastic, foil, ampules, etc.). Kits can also include a buffering agent, a preservative, or a protein/nucleic acid stabilizing agent.

### Sequencing

[0207] In some embodiments the target-enriched libraries are sequenced using any methods known in the art or as described herein. Sequencing can reveal the presence of mutations in one or more cancer-related genes in the set. In some embodiments a subset of 2, 3, 4 genes harboring the mutations are selected for further monitoring by assessment of cell-free DNA in a fluid sample isolated from the subject at later time points.

### Assessment of Cell-Free DNA Over Time

[0208] In some embodiments, assessment of cell free-DNA comprises detection and/or measurement of alleles of the subset of genes, as shown in FIG. 6. Detection of the alleles can be by any means known in the art or as described herein. The detection can be by methods as described in U.S. Pat. No. 5,538,848 (e.g., using a Taqman assay) or as described herein.

[0209] Accordingly, the present invention provides methods and kits for the sensitive detection of a mutation in a target polynucleotide. In some aspects, the methods and kits of the invention can be used for the discrimination of alleles in a target polynucleotide. For example, the invention provides methods and kits for the detection of mutant alleles in a background of high wild-type allelic ratio. For another example, the invention provides methods and kits for the detection of multiple alleles. In some embodiments, detection of an allele is enabled by release or activation of a detectable signal if the interrogated allele is present.

### Methods for Allele Detection

[0210] In some aspects, one or more methods of allele detection as described herein relate to the ability of an oligonucleotide primer to bind to a target polynucleotide region suspected of harboring the mutation. The oligonucleotide primer can partially overlay a locus of the suspected mutation. In some embodiments the oligonucleotide primer completely overlays the mutation. Accordingly, in some embodiments the mutation is small enough to be encompassed by an oligonucleotide primer. The mutation can be a single nucleotide polymorphism (SNP). The mutation can also comprise multiple nucleotide polymorphisms (e.g., double mutation or triple mutation). The mutation can be an insertion of one or more nucleotides. The mutation can be an insertion of 1, 2, 3, 4, 5, 6, 7, 8, 9, 10, 11, 12, 13, 14, 15, 16, 17, 18, 19, 20, 50, 100, 500, 1000, 10000, 100000, 1000000 nucleotides. The mutation can be an insertion of 1-5, 2-10, 5-15, or 10-20 nucleotides. In some embodiments, the mutation is a deletion of one or more nucleotides. The mutation can be a deletion of 1, 2, 3, 4, 5, 6, 7, 8, 9, 10, 11, 12, 13, 14, 15, 16, 17, 18, 19, 20 nucleotides. The mutation can be a deletion of 1-5, 2-10, 5-15, or 10-20 nucleotides. The mutation can be an inversion of two or more nucleotides. In some embodiments, 2, 3, 4, 5, or more nucleotides are inverted. In some embodiments, the mutation is a copy number variation (e.g., a copy number variation of a SNP or wild-type allele).

[0211] In one aspect, the invention provides a method of detecting a mutation in a target polynucleotide region, comprising the steps of: (a) contacting a nucleic acid sample with a reaction mixture comprising an oligonucleotide primer capable of hybridizing to the target polynucleotide region, wherein the oligonucleotide primer comprises a probe binding region and a template binding region that at least partially overlays a locus suspected of harboring the mutation and is capable of allele-specific extension by a polymerase; (b) extending the oligonucleotide primer to form an extension product; and (c) detecting the extension product, whereby the detecting the extension product indicates the presence of the mutation.

### Primers for Allele Detection

[0212] The oligonucleotide primer (e.g., a forward primer) can be designed to at least partially hybridize to a target polynucleotide suspected of harboring a mutation. In some embodiments, the template binding region of the forward primer is designed to selectively hybridize to the target polynucleotide. The hybridization can result in a forward primer/template duplex with a Tm. The Tm of the primer/template duplex can be between 0-100 deg C., between 20-90 deg C., between 40-80 deg C., between 50-70 deg C., or between 55-65 deg C. The template binding region of the forward primer can be 8-50, 10-40, or 12-24 nucleotides in length. The template binding region of the forward primer can be designed to at least partially overlay a particular locus suspected of harboring a mutation. The template binding region of the forward primer can, for example, overlay about at least 0.5%, 1%, 2%, 3%, 4%, 5%, 6%, 7%, 8%, 9%, 10%, 20%, 20%, 40%, 50%, 60%, 70%, 80%, 90%, or 100% of the locus suspected of harboring the mutation. The template binding region of the forward primer can overlay at least about 0.5-2%, 1-10%, 5-20%, 10-50%, 30-70%, 50-80%, 60-90%, or 80-100% of the locus suspected of harboring the mutation. The template binding region can be located at a 3′ region of the forward primer. In some embodiments, the region of the template binding region that overlays the locus is a 3′ terminal region. In some embodiments, the 3′ terminal region that overlays the mutation locus comprises 1, 2, 3, 4, 5, or more than 5 bases of the 3′-end of the template binding region. In some embodiments, the 3′ terminal base of the forward primer overlays the locus. In some embodiments, the 3′ terminal region of the forward primer is complementary to the interrogated allele. The 3′ terminal base of the forward primer may not complementary to the interrogated allele. In some embodiments, one or more mismatches is introduced into the 3′-region adjacent to the 3′-terminal base (e.g., n-1, n-2, n-3, etc.). These mismatches can be nucleotides or modified nucleotides that increase or decrease the impact of this mismatch on primer extension.

[0213] The template binding region can at least partially overlay with a locus that is suspected of having a copy number variation. In some embodiments, the template binding region of the forward primer can overlay at least about 0.5-2%, 1-10%, 5-20%, 10-50%, 30-70%, 50-80%, 60-90%, or 80-100% of the locus suspected of having a copy number variation.

[0214] The 3′ terminal region of the forward primer can comprise nucleotides linked by phosphorothioate linkages. In some embodiments, at least 2, 3, 4, 5, or more nucleotides at the 3′ terminal region of the forward primer are linked by phosphorothioate linkages.

[0215] Generally, the probe-binding region of the forward primer enables use of a reporter probe that is template independent. The probe-binding region can comprise a unique sequence or barcode that does not hybridize to the template nucleic acid. The probe-binding region can, for example, be designed to avoid significant sequence similarity or complementarity to known genomic sequences of an organism of interest. Such unique sequences can be randomly generated, e.g., by a computer readable medium, and selected by BLASTing against known nucleotide databases such as, e.g., EMBL, GenBank, or DDBJ. The barcode sequence can also be designed to avoid secondary structure. Tools for probe design are known in the art, and include, e.g., mFold, Primer Express. The probe-binding region can be 5-50, 6-40, or 7-30 nucleotides in length. The probe-binding region can be 1-20, 3-15, or 6-8 nucleotides away from the template binding region of the forward primer. The probe-binding region can be located 5′ of the template binding region.

[0216] In some embodiments, the method further comprises contacting the nucleic acid sample with a reverse primer. The reverse primer can be an oligonucleotide primer that corresponds to a region of template nucleic acid that is downstream of the forward primer. In some embodiments, the reverse primer is downstream of the interrogated allele. The reverse primer can bind to a reverse complement strand of the target polynucleotide. A forward/reverse primer pair can span a target region suspected of harboring a mutation. In some embodiments, the target region is 14-1000, 20-800, 40-600, 50-500, 70-300, 90-200, or 100-150 nucleotides long.

[0217] Primers or other oligonucleotides used in the present invention may further comprise a barcode sequence. Barcode sequences are described herein. In some embodiments, a barcode sequence encodes information relating to the identity of an interrogated allele, identity of a target polynucleotide or genomic locus, identity of a sample, a subject, or any combination thereof. A barcode sequence can be a portion of a primer, a reporter probe, or both. A barcode sequence may be at the 5′-end or 3′-end of an oligonucleotide, or may be located in any region of the oligonucleotide. A barcode sequence generally is not part of a template sequence. Barcode sequences may vary widely in size and composition; the following references provide guidance for selecting sets of barcode sequences appropriate for particular embodiments: Brenner, U.S. Pat. No. 5,635,400; Brenner et al, Proc. Natl. Acad. Sci., 97: 1665-1670 (2000); Shoemaker et al, Nature Genetics, 14: 450-456 (1996); Morris et al, European patent publication 0799897A1; Wallace, U.S. Pat. No. 5,981,179. A barcode sequence may have a length of about 4 to 36 nucleotides, about 6 to 30 nucleotides, or about 8 to 20 nucleotides.

[0218] Primers used in the present invention are generally sufficiently long to prime the synthesis of extension products in the presence of the agent for polymerization. The exact length and composition of a primer can depend on many factors, including temperature of the annealing reaction, source and composition of the primer, and ratio of primer:probe concentration. The primer length can be, for example, about 5-100, 10-50, or 20-30 nucleotides, although a primer may contain more or fewer nucleotides.

### Reporter Probes

[0219] In some embodiments, the reaction mixture further comprises a reporter probe. Generally, the reporter probe of the present invention is designed to produce a detectable signal indicating the presence of the interrogated allele.

[0220] The reporter probe can comprise a detectable moiety and a quencher moiety. The detectable moiety can be a dye. The dye can be a fluorescent dye, e.g., a fluorophore. The fluorescent dye can be a derivatized dye for attachment to the terminal 3′ carbon or terminal 5′ carbon of the probe via a linking moiety. The dye can be derivatized for attachment to the terminal 5′ carbon of the probe via a linking moiety. Quenching can involve a transfer of energy between the fluorophore and the quencher. The emission spectrum of the fluorophore and the absorption spectrum of the quencher can overlap. When the probe is intact, the fluorescent signal from the detectable moiety can be substantially suppressed by the quencher. Cleavage of the reporter probe, e.g., by hydrolysis, can separate the detectable moiety from the quencher moiety. The separation can enable the fluorescent moiety to produce a detectable fluorescent signal.

[0221] The reporter probes may be designed according to Livak et al., “Oligonucleotides with fluorescent dyes at opposite ends provide a quenched probe system useful for detecting PCR product and nucleic acid hybridization,” PCR Methods Appl. 1995 4: 357-362.

[0222] Reporter-quencher moiety pairs for particular probes can be selected according to, e.g., Pesce et at, editors, Fluorescence Spectroscopy (Marcel Dekker, New York, 1971); White et at, Fluorescence Analysis: A Practical Approach (Marcel Dekker, New York, 1970. Exemplary fluorescent and chromogenic molecules that may be used in reporter-quencher pairs, are described in, e.g. Berlman, Handbook of Fluorescence Sprectra of Aromatic Molecules, 2nd Edition (Academic Press, New York, 1971); Griffiths, Colour and Constitution of Organic Molecules (Academic Press, New York, 1976); Bishop, editor, Indicators (Pergamon Press, Oxford, 1972); Haugland, Handbook of Fluorescent Probes and Research Chemicals (Molecular Probes, Eugene, 1992); Pringsheim, Fluorescence and Phosphorescence (Interscience Publishers, New York, 1949).

[0223] A wide variety of reactive fluorescent reporter dyes can be used so long as they are quenched by a quencher dye of the invention. The fluorophore can be an aromatic or heteroaromatic compound. The fluorophore can be, for example, a pyrene, anthracene, naphthalene, acridine, stilbene, benzoxaazole, indole, benzindole, oxazole, thiazole, benzothiazole, canine, carbocyanine, salicylate, anthranilate, xanthenes dye, coumarin. Exemplary xanthene dyes include, e.g., fluorescein and rhodamine dyes. Exemplary fluorescein and rhodamine dyes include, but are not limited to 6-carboxyfluorescein (FAM), 2′7′-dimethoxy-4′5′-dichloro-6-carboxyfluorescein (JOE), tetrachlorofluorescein (TET), 6-carboxyrhodamine (R6G), N,N,N; N′-tetramethyl-6-carboxyrhodamine (TAMRA), 6-carboxy-X-rhodamine (ROX). Suitable fluorescent reporters also include the naphthylamine dyes that have an amino group in the alpha or beta position. For example, naphthylamino compounds include 1-dimethylaminonaphthyl-5-sulfonate, 1-anilino-8-naphthalene sulfonate and 2-p-toluidinyl-6-naphthalene sulfonate, 5-(2′-aminoethyl)aminonaphthalene-1-sulfonic acid (EDANS). Exemplary coumarins include, e.g., 3-phenyl-7-isocyanatocoumarin; acridines, such as 9-isothiocyanatoacridine and acridine orange; N-(p-(2-benzoxazolyl)phenyl)maleimide; cyanines, such as, e.g., indodicarbocyanine 3 (Cy3), indodicarbocyanine 5 (Cy5), indodicarbocyanine 5.5 (Cy5.5), 3-(-carboxy-pentyl)-3′-ethyl-5,5′-dimethyloxacarbocyanine (CyA); 1H, 5H, 11H, 15H-Xantheno[2,3,4-ij: 5,6,7-i′j′]diquinolizin-18-ium, 9-[2 (or 4)-[[[6-[2,5-dioxo-1-pyrrolidinyl)oxy]-6-oxohexyl]amino]sulfonyl]-4 (or 2)-sulfophenyl]-2,3,6,7,12,13,16,17-octahydro-inner salt (TR or Texas Red); or BODIPYTM dyes. Exemplary fluorescent and quencher moieties are described in, e.g., WO/2005/049849.

[0224] As is known in the art, suitable quenchers are selected according to the fluorescer. Exemplary reporters and quenchers are further described in Anderson et al, U.S. Pat. No. 7,601,821.

[0225] Quenchers are also available from various commercial sources. Exemplary commercially available quenchers include, e.g., Black Hole Quenchers® from Biosearch Technologies and Iowa Black® or ZEN quenchers from Integrated DNA Technologies, Inc.

[0226] In some embodiments, the reporter probe comprises two quencher moieties. Exemplary probes comprising two quencher moieties include the Zen probes from Integrated DNA Technologies. Such probes comprise an internal quencher moiety that is located about 9 bases away from the detectable moiety, and generally reduce background signal associated with traditional reporter/quencher probes.

[0227] Detectable moieties and quencher moieties can be derivatized for covalent attachment to oligonucleotides via common reactive groups or linking moieties. Methods for derivatization of detectable and quencher moieties are described in, e.g., Ullman et al, U.S. Pat. No. 3,996,345; Khanna et al, U.S. Pat. No. 4,351,760; Eckstein, editor, Oligonucleotides and Analogues: A Practical Approach (IRL Press, Oxford, 1991); Zuckerman et al, Nucleic Acids Research, 15: 5305-5321 (1987) (3′ thiol group on oligonucleotide); Sharma et al, Nucleic Acids Research, 19:3019 (1991) (3′ sulfhydryl); Giusti et al, PCR Methods and Applications, 2:223-227 (1993) and Fung et al, U.S. Pat. No. 4,757,141 (5′ phosphoamino group via Aminolink™ II available from Applied Biosystems, Foster City, Calif.); Stabinsky, U.S. Pat. No. 4,739,044 (3′ aminoalkylphosphoryl group); Agrawal et al, Tetrahedron Letters, 31:1543-1546 (1990) (attachment via phosphoramidate linkages); Sproat et al, Nucleic Acids Research, 15:4837 (1987) (5′ mercapto group); Nelson et al, Nucleic Acids Research, 17:7187-7194 (1989) (3′ amino group).

[0228] In some embodiments, commercially available linking moieties can be attached to an oligonucleotide during synthesis, e g linking moieties available through Clontech Laboratories (Palo Alto, Calif.). By way of example only, rhodamine and fluorescein dyes can be derivatized with a phosphoramidite moiety for attachment to a 5′ hydroxyl of an oligonucleotide (see, e.g., Woo et al, U.S. Pat. No. 5,231,191; and Hobbs, Jr. U.S. Pat. No. 4,997,928)

[0229] In some embodiments, the detectable moiety produces a non-fluorescent signal. For example, any probe for which hydrolysis of the probe results in a detectable separation of a signal moiety from the detection probe-amplicon complex may be used. For example, release of the signal moiety may be detected electronically (e.g., as an electrode surface charge perturbation when a signal moiety is released from the detection probe/amplicon complex), by quantum dot sensing, by luminescence, or chemically (e.g., by a change in pH in a solution as a signal moiety is released into solution). Likewise, any probe that binds to a probe-binding region and for which a change in signal can be detected upon separation of a detectable moiety from a quencher moiety may be used. For example, molecular beacon probes, MGB probes, or other probes are contemplated for use in the invention. Molecular beacon probes are described in, e.g., U.S. Pat. Nos. 5,925,517 and 6,103,406. MGB probes are described in, e.g., U.S. Pat. No. 7,381,818.

[0230] The reporter probe can be designed to selectively hybridize to a probe-binding region as described herein. Accordingly, in some embodiments the reporter probe comprises a sequence that is complementary to at least a portion of the probe-binding region. The reporter probe can be 5-50, 6-40, or 7-30 nucleotides in length. The hybridization can result in a probe/primer duplex with a Tm. The Tm of the probe/primer duplex can be higher than the Tm of the primer/template duplex. The Tm of the probe/primer duplex can be 1, 2, 3, 4, 5, 6, 7, 8 9, 10, or more than 10 deg C. than the Tm of the primer/template duplex.

[0231] In some embodiments, the reporter probe selectively hybridizes to a sequence in the probe-binding region that is at least 2, 3, 4, 5, 6, 7, 8, 9, 10, 15, or 20 nucleotides apart from the template binding region of the primer.

[0232] The reporter probe can be present at a concentration that is higher than the concentration of the forward primer. The reporter probe can for example be present in a concentration that is, e.g., 1-10 fold or 1-5 fold higher than the concentration of the forward primer. The reporter probe can be present in a concentration that results in at least 50%, at least 60%, at least 70%, at least 80%, at least 90%, at least 95%, at least 96%, at least 97%, at least 98%, at least 99%, or about 100% of the forward primers occupied by the probe.

[0233] The primers and probes of the invention may be prepared by any suitable method. Methods for preparing oligonucleotides of specific sequence are known in the art, and include, for example, cloning and restriction of appropriate sequences and direct chemical synthesis. Chemical synthesis methods may include, for example, the phosphotriester method described by Narang et al., 1979, Methods in Enzymology 68:90, the phosphodiester method disclosed by Brown et al., 1979, Methods in Enzymology 68:109, the diethylphosphoramidate method disclosed in Beaucage et al., 1981, Tetrahedron Letters 22:1859, and the solid support method disclosed in U.S. Pat. No. 4,458,066.

[0234] In some embodiments, a forward primer comprising a template binding region and a probe-binding region can be prepared using two different oligonucleotides corresponding to the template binding region and probe binding region, respectively. The two oligonucleotides can be ligated enzymatically. Ligation can be by an RNA ligase. The RNA ligase can be an ATP dependent ligase. The RNA ligase can be an Rnl 1 family ligase. Generally, Rnl 1 family ligases can repair single-stranded breaks in tRNA. Exemplary Rnl 1 family ligases include, e.g., T4 RNA ligase, thermostable RNA ligase 1 from Thermus scitoductus bacteriophage TS2126 (CircLigase), or CircLigase II. Generally, Rnl 2 family ligases can seal nicks in duplex RNAs. Exemplary Rnl 2 family ligases include, e.g., T4 RNA ligase 2. The RNA ligase can be an Archaeal RNA ligase, e.g., an archaeal RNA ligase from the thermophilic archaeon Methanobacterium thermoautotrophicum (MthRnl). Ligation can also be effected by use of a splint oligonucleotide that spans the two oligonucleotides corresponding to the template binding and probe binding regions, respectively. In some embodiments, ligation using a splint oligonucleotide can comprise use of a T4 DNA ligase. Alternatively, ligation can be mediated by an ATP-independent ligase. Exemplary ATP-independent ligases include, e.g., RNA 3′-Phosphate Cyclase (RtcA), RNA ligase RtcB, or manufactured variants thereof. In some embodiments, ligation is performed indirectly through a two-step process, in which a template binding region is adenylated (e.g., adenylated chemically during synthesis or enzymatically using a ligase), and the adenylated template binding sequence is conjugated to the probe binding region.

[0235] Ligation can also be performed with “click chemistry.” Click chemistry is a concept that involves linking smaller subunits with simple chemistry. Smaller subunits can refer to small building blocks of larger molecules such as DNA bases, RNA nucleotides, linear or circularized DNA or RNA oligonucleotides. (3+2) cycloadditions between azide and alkyne groups which results in the formation of 1,2,3-triazole rings (e.g., copper-catalysed alkyne-azide coupling reaction) are generally considered typical click chemistry reactions. Other chemical ligation methods include the use of cyanogen bromide, phosphorothioate-iodoacetyl, and native ligation techniques where a C-terminal α-thioester is reacted in a chemoselective manner with an unprotected peptide containing an N-terminal Cys residue)

[0236] Primers and/or reporter probes can also be obtained from commercial sources such as Operon Technologies, Amersham Pharmacia Biotech, Sigma, IDT Technologies, and Life Technologies. The primers can have an identical melting temperature. The lengths of the primers can be extended or shortened at the 5′ end or the 3′ end to produce primers with desired melting temperatures. Also, the annealing position of each primer pair can be designed such that the sequence and, length of the primer pairs yield the desired melting temperature. The simplest equation for determining the melting temperature of primers smaller than 25 base pairs is the Wallace Rule (Td=2(A+T)+4(G+C)). Computer programs can also be used to design primers, including but not limited to Array Designer Software (Arrayit Inc.), Oligonucleotide Probe Sequence Design Software for Genetic Analysis (Olympus Optical Co.), NetPrimer, and DNAsis from Hitachi Software Engineering. The Tm (melting or annealing temperature) of each primer can be calculated using software programs such as Oligo Design, available from Invitrogen Corp.

[0237] The annealing temperature of the primers can be recalculated and increased after any cycle of amplification, including but not limited to cycle 1, 2, 3, 4, 5, cycles 6-10, cycles 10-15, cycles 15-20, cycles 20-25, cycles 25-30, cycles 30-35, or cycles 35-40. After the initial cycles of amplification, part of the primers may be incorporated into the products from each loci of interest, thus the TM can be recalculated based on the part of the primer incorporated into the product.

[0238] Reaction Mixture

[0239] The term “reaction mixture” as used herein generally refers to a mixture of components necessary to amplify at least one amplicon from nucleic acid template molecules. The mixture may comprise nucleotides (dNTPs), a polymerase and primers. The mixture may further comprise a Tris buffer, a monovalent salt, and Mg2+. The concentration of each component is well known in the art and can be further optimized by an ordinary skilled artisan. In some embodiments, the reaction mixture also comprises additives including, but not limited to, non-specific background/blocking nucleic acids (e.g., salmon sperm DNA), biopreservatives (e.g. sodium azide), PCR enhancers (e.g. Betaine, Trehalose, etc.), and inhibitors (e.g. RNAse inhibitors). In some embodiments, a nucleic acid sample is admixed with the reaction mixture. Accordingly, in some embodiments the reaction mixture further comprises a nucleic acid sample.

### Amplification

[0240] The method can comprise amplification of template nucleic acid in the reaction mixture. In some embodiments amplification is carried out utilizing a nucleic acid polymerase. The nucleic acid polymerase can be a DNA polymerase. The DNA polymerase can be a thermostable DNA polymerase.

[0241] Some aspects of the allele detection methods described herein relate to the ability of a DNA polymerase to separate a detectable moiety and quencher moiety in a reporter probe. Exemplary reporter probes are described herein. Separation of the detectable and quencher moiety can occur by cleavage of the reporter probe by the DNA polymerase. Cleavage of the reporter probe can occur by a 5′→3′ exonuclease activity of the DNA polymerase. Accordingly, in some embodiments, the DNA polymerase comprises 5′→3′ exonuclease activity. As used herein, “5′→3′ nuclease activity” or “5′ to 3′ nuclease activity” can refer to an activity of a template-specific nucleic acid polymerase whereby nucleotides are removed from the 5′ end of an oligonucleotide in a sequential manner. DNA polymerases with 5′→3′ exonuclease activity are known in the art and include, e.g., DNA polymerase isolated from Thermus aquaticus (Taq DNA polymerase).

[0242] Some aspects of the allele detection methods described herein further relate to the discriminative ability of a primer to be extended by a nucleic acid polymerase (e.g., a DNA polymerase) in an amplification step, depending on the presence or absence of a mismatch between the terminal 3′ base of the primer and its hybridized template polynucleotide. In cases wherein there is no mismatch between the terminal 3′ base of the primer and template nucleotide, extension of the primer by DNA polymerase can efficiently occur during an amplification reaction. In cases wherein there is a mismatch between the terminal 3′ base of the primer and template nucleotide (e.g., the bases are not complementary), extension of the primer by DNA polymerase does not occur. In some embodiments extension of the mismatched primer does not occur if the DNA polymerase lacks 3′→5′ exonuclease activity. 3′→5′ exonuclease activity, as used herein, generally refers to an activity of a DNA polymerase whereby the polymerase recognizes a mismatched basepair and moves backward by one base to excise the incorrect nucleotide. Accordingly, the DNA polymerase can lack 3′→5′ exonuclease activity. Exemplary DNA polymerases lacking 3′→5′ exonuclease activity include, but are not limited to BST DNA polymerase I, BST DNA polymerase I (large fragment), Tag polymerase, Streptococcus pneumoniae DNA polymerase I, Klenow Fragment (3′→5′ exo-), PyroPhage® 3173 DNA Polymerase, Exonuclease Minus (Exo-) (available from Lucigen), T4 DNA Polymerase, Exonuclease Minus (Lucigen). In some embodiments, the DNA polymerase is a recombinant DNA polymerase that has been engineered to lack exonuclease activity.

[0243] In other embodiments, extension of the mismatched primer by DNA polymerase does not occur wherein the DNA polymerase has 3′→5′ exonuclease activity. In particular embodiments, extension of the mismatched primer by DNA polymerase having 3′→5′ exonuclease activity does not occur if the 3′ terminal region of the mismatch primer comprises nucleotides linked by phosphorothioate linkages. Exemplary primers comprising nucleotides linked by phosphorothioate linkages are described herein.

[0244] In some embodiments, the PCR process is carried out as an automated process wherein the reaction mixture comprising template DNA is cycled through a denaturing step, a reporter probe and primer annealing step, and a synthesis step, whereby cleavage and displacement occurs simultaneously with primer-dependent template extension. The automated process may be carried out using a PCR thermal cycler. Commercially available thermal cycler systems include systems from Bio-Rad Laboratories, Life technologies, Perkin-Elmer, among others.

[0245] Repeated cycles of denaturation, primer/probe annealing, primer extension, and reporter probe cleavage can result in the exponential accumulation of detectable signal. Sufficient cycles are run to achieve detection of the detectable signal, which can be several orders of magnitude greater than background signal.

[0246] The present invention is compatible, however, with other amplification systems, such as the transcription amplification system, in which one of the PCR primers encodes a promoter that is used to make RNA copies of the target sequence. In similar fashion, the present invention can be used in a self-sustained sequence replication (3SR) system, in which a variety of enzymes are used to make RNA transcripts that are then used to make DNA copies, all at a single temperature. By incorporating a polymerase with 5′→3′ exonuclease activity into a ligase chain reaction (LCR) system, together with appropriate primer/probe sets, one can also employ the present invention to detect LCR products.

[0247] FIG. 7 depicts an exemplary embodiment of a method of the present invention. In a first step 701, a DNA sample comprising template DNA molecules 702 and 703 are contacted with a reaction mixture comprising dNTPs (not shown), a thermostable DNA polymerase 709 comprising 5′→3′ exonuclease activity and not comprising 3′→5′ exonuclease activity, a forward primer F1 comprising a probe-binding region 705 and a template binding region 706, and a reverse primer R. The 3′ terminal base of the forward primer F1 is complementary to a mutant allele 707 which resides on template molecule 702. By contrast, template molecule 703 has a wild-type allele 708 which is mismatched to the 3′ terminal base of forward primer F1. Also comprised in the reaction mixture is a reporter probe P which comprises a 5′ fluorescent moiety (triangle) and a 3′ quencher moiety (circle). In a first round of amplification (step 720), an annealing step is carried out wherein reporter probe P hybridizes to probe-binding region 705, resulting in a primer/reporter duplex P/F1. Additionally, F1 hybridizes to template molecules 702 and 703, resulting in complexes P/F1/102 and P/F1/103. During a synthesis step, DNA polymerase 709 promotes efficient extension of the P/F1/102 complex due to complementarity of the 3′ terminal base of F1 with mutant allele 707. The extension of F1 from template molecule 702 results in a chimeric extension product comprising the extended primer F1 and the hybridized reporter probe P. The extended primer F1 further comprises a primer binding site for reverse primer R. By contrast, extension of P/F1/103 does not occur because of a mismatch between wild-type allele 708 and the 3′ terminal base of F1. Accordingly, no chimeric extension product comprising the extended primer F1 and hybridized reporter probe P is produced from a template molecule containing the wild-type allele. In a second (and any subsequent round) of amplification (step 730), reverse primer R hybridizes to the chimeric extension product. DNA polymerase 709 promotes extension of reverse primer R, and the 5′→3′ exonuclease activity of polymerase 709 separates the fluorescent moiety from the quencher moiety, e.g., by hydrolysis, resulting in a detectable signal.

[0248] In some embodiments, a reaction mixture can comprise multiple primers and probes for multiplex detection. By way of example only, a reaction mixture can comprise a common reverse primer and two or more forward primers, wherein each of the forward primers hybridizes to the same region in the template polynucleotide but differs from the other forward primers in the 5′ probe-binding region, wherein each forward primer comprises a unique probe-binding region, and wherein the template binding region of each of the forward primers differs from the other forward primers in the 3′ terminal base, which is complementary to either a wild-type allele or to one or another mutant alleles. Accordingly, the reaction mixture can also comprise two or more different reporter probes, each probe having a sequence corresponding to one of the two or more unique probe-binding regions on the two or more forward primers and comprising a distinct detectable moiety that is detectably distinct from any other detectable moiety in the reaction mixture.

[0249] An exemplary embodiment of a multiplex assay detecting multiple alleles at a single locus is depicted in FIG. 7B. In a first step 740, a DNA sample comprising template DNA molecules 702 and 703 are contacted with a reaction mixture comprising dNTPs (not shown), a thermostable DNA polymerase 709 comprising 5′→3′ exonuclease activity and not 3′→5′ exonuclease activity, a forward primer F1 comprising a probe-binding region 705 and a template binding region 706, a forward primer F2 comprising a probe-binding region 710 and a template binding region 711. The template binding regions 706 and 711 are identical except for the 3′ terminal base, which in F1 is complementary to a mutant allele 707 which resides on template molecule 702 and in F2 is complementary to a wild-type allele 708 which resides on template molecule 703. Accordingly, there is a mismatch between the 3′ terminal base of 706 and wild-type allele 708, and a mismatch between the 3′ terminal base of 711 and mutant allele 707. Also comprised in the reaction mixture is reporter probe P1 which comprises a 5′ fluorescent moiety (triangle) and a 3′ quencher moiety (circle) and reporter probe P2 which comprises a spectrally distinct 5′ fluorescent moiety (square) and a 3′ quencher moiety (circle). The reporter probe P1 hybridizes to probe-binding region 705, resulting in a P1/F1 duplex, and reporter probe P2 hybridizes to probe-binding region 710, resulting in a P2/F2 duplex. In a first round of amplification (step 750), F1 and F2 hybridize to template molecules 702 and 703, which can result in P1/F1/702, P1/F1/703, P2/F2/702, and P2/F2/703 complexes. DNA polymerase 709 can promote efficient extension of P1/F1/702 and P2/F2/703, which can result in chimeric extension products comprising the extended primer F1 and the hybridized reporter probe P1 (F1-P1) and/or extended primer F2 and the hybridized reporter probe P2 (F2-P2), respectively. The extended primers F1-P1 and F2-P2 may each further comprise a primer binding site for reverse primer R. By contrast, no extension of P1/F1/703 or P2/F2/702 occurs due to the presence of a mismatch between the 3′ terminal base of the forward primers and the template DNA. Accordingly, no chimeric extension product comprising the extended primer F1 and hybridized reporter probe P2 or comprising extended primer F2 and hybridized reporter P1 is produced. In a second (and any subsequent round) of amplification (step 760), reverse primer R can hybridize to the chimeric extension products F1-P1 and F2-P2. DNA polymerase 709 can promote extension of reverse primer R, and the 5′→3′ exonuclease activity of polymerase 709 separates the fluorescent moiety from the quencher moiety of each probe P1 and P2, resulting in spectrally distinct signals 731 and 732.

[0250] By way of other example only, a reaction mixture can comprise a plurality of primer/probe sets, wherein each set comprises a plurality of forward primers for the detection of multiple alleles at a particular locus, each forward primer harboring a unique probe-binding sequence and a template binding region, the 3′ terminal base of the template binding region corresponding to an allele of the locus, a common reverse primer, and detectably distinct reporter probes specific for each forward primer in the set. Such a reaction mixture can be used for the multiplex detection of multiple alleles at a plurality of loci. Accordingly, in some embodiments the invention provides a method of detecting up to 2, 3, 4, 5, 6, 7, 8, 9, 10, 20, 30, 40, 50, 60, 70, 80, 90, 100 alleles in a single multiplex assay.

[0251] In some embodiments, a reaction mixture comprises a plurality of primer/probe sets, wherein each set comprises a forward primer harboring a unique probe-binding sequence and a template binding region, a reverse primer that binds to a region downstream of said forward primer, and a detectably distinct reporter probe specific for the forward primer. Such a reaction mixture can be used for the multiplex detection of multiple loci. Multiplex detection of multiple loci can be used to assay copy number variation. For example, a first locus can be a region suspected of having a copy number variation and second locus can be a region that is predicted to not have a copy number variation. Comparison of detectable signal corresponding to the first and second loci can be used to measure copy number variation.

[0252] The detectable signal can be monitored in real-time during each amplification cycle. As used herein, “real-time PCR” can refer to PCR methods wherein an amount of detectable signal is monitored with each cycle of PCR. In some embodiments, a cycle threshold (Ct) wherein a detectable signal reaches a detectable level is determined. Generally, the lower the Ct value, the greater the concentration of the interrogated allele. Generally, data is collected during the exponential growth (log) phase of PCR, wherein the quantity of the PCR product is directly proportional to the amount of template nucleic acid. Systems for real-time PCR are known in the art and include, e.g., the ABI 7700 and 7900HT Sequence Detection Systems (Applied Biosystems, Foster City, Calif.). The increase in signal during the exponential phase of PCR can provide a quantitative measurement of the amount of templates containing the mutant allele.

[0253] In other embodiments, the detectable signal is monitored after amplification cycles have terminated (e.g., endpoint detection).

### Partitioning/Digital PCR

[0254] The method also can comprise partitioning the reaction mixture and nucleic acid sample into discrete volumes prior to amplification. Discrete volumes can contain template nucleic acid molecules from a starting nucleic acid sample. The starting nucleic acid sample can be diluted such that discrete volumes contain on average less than one nucleic acid molecule. Partitions can contain no nucleic acid molecule. Partitions with no nucleic acids enable the use of Poisson statistics to determine original input DNA concentration. In particular embodiments, the starting nucleic acid sample is diluted such that discrete volumes contain on average 0.5 nucleic acid molecules or less. In some embodiments, discrete volumes can comprise a reaction mixture. Reaction mixtures are described herein. The method can comprise partitioning a nucleic acid sample into one set of discrete volumes, partitioning a reaction mixture into a second set of discrete volumes, and merging single discrete volumes from the first set with single discrete volumes from the second set to produce merged discrete volumes comprising a template nucleic acid molecule form and a reaction mixture. In other embodiments, the method comprises admixing a nucleic acid sample with a reaction mixture to produce an admixture, and partitioning the admixture into discrete volumes. Discrete volumes can be independently assayed for the detection of one or more alleles.

[0255] Specific methods for partitioning are not critical to the practice of the invention. For example, partitioning can be carried out by manual pipetting. In a particular example, reaction mixture and nucleic acid sample can be distributed to individual tubes or well by manual pipetting. In another example, robotic methods can be used for the partitioning step. Microfluidic methods can also be used for the partitioning step.

[0256] A discrete volume can be, e.g., a tube, a well, a perforated hole, a reaction chamber, or a droplet, such as a droplet of an aqueous phase dispersed in an immiscible liquid, such as described in U.S. Pat. No. 7,041,481. Discrete volumes can be arranged into arrays of discrete volumes. Exemplary arrays include the Open array digital PCR system by Life Technologies (described in http://tools.invitrogen.com/content/sfs/manuals/cms_{—}088717.pdf) and array systems by Fluidigm (www.fluidigm.com).

[0257] Partitioning a sample into small reaction volumes can confer many advantages. For example, the partitioning may enable the use of reduced amounts of reagents, thereby lowering the material cost of the analysis. By way of other example, partitioning can also improve sensitivity of detection. Without wishing to be bound by theory, partitioning of the reaction mixture and template DNA into discrete reaction volumes can give rare molecules greater proportional access to reaction reagents, thereby enhancing detection of rare molecules. For example, partitioning can enable the detection of a rare allele in a background of high wild-type allelic ratio. Accordingly, in some embodiments a reaction volume can be less than 1 ml, less than 500 microliters (ul), less than 100 ul, less than 10 ul, less than 1 ul, less than 0.5 ul, less than 0.1 ul, less than 50 nl, less than 10 nl, less than 1 nl, less than 0.1 nl, less than 0.01 nl, less than 0.001 nl, less than 0.0001 nl, less than 0.00001 nl, or less than 0.000001 nl. In some embodiments, a reaction volume can be 1-100 picoliters (pl), 50-500 μl, 0.1-10 nanoliters (nl), 1-100 nl, 50-500 nl, 0.1-10 microliters (ul), 5-100 ul, 100-1000 ul, or more than 1000 ul. In some embodiments, the reaction volumes are droplets. Without wishing to be bound by theory, the use of small droplets can enable the processing of large numbers of reactions in parallel. Accordingly, in some cases, the droplets have an average diameter of about, 0.000000000000001, 0.0000000000001, 0.00000000001, 0.000000001, 0.0000001, 0.000001, 0.00001, 0.0001, 0.001, 0.01, 0.05, 0.1, 1, 5, 10, 20, 30, 40, 50, 60, 70, 80, 100, 120, 130, 140, 150, 160, 180, 200, 300, 400, or 500 microns.

[0258] In some embodiments, the method comprises detection and/or measurement of an allele by digital PCR. The term “digital PCR”, as used herein, can refer to a PCR amplification which is carried out on a nominally single, selected template molecule, wherein a number of individual single molecules are each isolated into discrete reaction volumes. In some embodiments, a large number of reaction volumes are used to produce higher statistical significance. Generally, PCR amplification in a reaction volume containing a single template (such as, e.g., a well, chamber, bead, emulsion, etc.) can have either a negative result, e.g., no detectable signal if no starting molecule is present, or a positive result, e.g., a detectable signal, if the targeted starting molecule is present. By analyzing a number of reaction areas indicating a positive result, insight into the number of starting molecules can be obtained. Such an analysis can be used for measurement of an amount of wild-type or mutant alleles in a sample, or be used for a measurement of copy number variation of a locus in a sample.

[0259] In particular embodiments, the method comprises droplet digital PCR methods. “Droplet digital PCR” generally refers to digital PCR wherein the reaction volumes are droplets. The droplets provided herein can prevent mixing between reaction volumes.

[0260] The droplets described herein can include emulsion compositions. The term “emulsion”, as used herein, generally refers to a mixture of immiscible liquids (such as oil and an aqueous solution, e.g., water). In some embodiments, the emulsion comprise aqueous droplets within a continuous oil phase. In other embodiments, the emulsion comprises oil droplets within a continuous aqueous phase. The mixtures or emulsions described herein may be stable or unstable. In preferred embodiments, the emulsions are relatively stable.

[0261] In some embodiments the emulsions exhibit minimal coalescence. “Coalescence” refers to a process in which droplets combine to form progressively larger droplets. In some cases, less than 0.00001%, 0.00005%, 0.00010%, 0.00050%, 0.001%, 0.005%, 0.01%, 0.05%, 0.1%, 0.5%, 1%, 2%, 2.5%, 3%, 3.5%, 4%, 4.5%, 5%, 6%, 7%, 8%, 9%, or 10% of droplets exhibit coalescence. The emulsions may also exhibit limited flocculation, a process by which the dispersed phase comes out of suspension in flakes. In some cases, less than 0.00001%, 0.00005%, 0.00010%, 0.00050%, 0.001%, 0.005%, 0.01%, 0.05%, 0.1%, 0.5%, 1%, 2%, 2.5%, 3%, 3.5%, 4%, 4.5%, 5%, 6%, 7%, 8%, 9%, or 10% of droplets exhibit flocculation.

[0262] The droplets can either be monodisperse (e.g., of substantially similar size and dimensions) or polydisperse (e.g., of substantially variable size and dimensions. In some embodiments, the droplets are monodisperse droplets. In some cases, the droplets are generated such that the size of the droplets does not vary by more than plus or minus 5% of the average size of the droplets. In some cases, the droplets are generated such that the size of the droplets does not vary by more than plus or minus 2% of the average size of the droplets. In some cases, a droplet generator will generate a population of droplets from a single sample, wherein none of the droplets vary in size by more than plus or minus 0.1%, 0.5%, 1%, 1.5%, 2%, 2.5%, 3%, 3.5%, 4%, 4.5%, 5%, 5.5%, 6%, 6.5%, 7%, 7.5%, 8%, 8.5%, 9%, 9.5%, or 10% of the average size of the total population of droplets.

[0263] In some embodiments, the present invention provides systems, devices, and methods for droplet generation. In some embodiments, microfluidic systems are configured to generate monodisperse droplets (see, e.g., Kiss et al. Anal Chem. 2008 Dec. 1; 80(23): 8975-8981). In some embodiments, the present invention provides micro fluidics systems for manipulating and/or partitioning samples.

[0264] In some embodiments, a microfluidics system comprises one or more of channels, valves, pumps, etc. (U.S. Pat. No. 7,842,248, herein incorporated by reference in its entirety). In some embodiments, a microfluidics system is a continuous-flow microfluidics system (see, e.g., Kopp et al., Science, vol. 280, pp. 1046-1048, 1998). In some embodiments, microarchitecture of the present invention includes, but is not limited to microchannels, microfluidic plates, fixed microchannels, networks of microchannels, internal pumps; external pumps, valves, centrifugal force elements, etc. In some embodiments, the microarchitecture of the present invention (e.g. droplet microactuator, microfluidics platform, and/or continuous-flow microfluidics) is complemented or supplemented with droplet manipulation techniques, including, but not limited to electrical (e.g., electrostatic actuation, dielectrophoresis), magnetic, thermal (e.g., thermal Marangoni effects, thermocapillary), mechanical (e.g., surface acoustic waves, micropumping, peristaltic), optical (e.g., opto-electrowetting, optical tweezers), and chemical means (e.g., chemical gradients). In some embodiments, a droplet microactuator is supplemented with a microfluidics platform (e.g. continuous flow components) and such combination approaches involving discrete droplet operations and microfluidics elements are within the scope of the invention.

[0265] In some embodiments, methods of the invention utilize a droplet microactuator. In some embodiments, a droplet microactuator is capable of effecting droplet manipulation and/or operations, such as, e.g., dispensing, splitting, transporting, merging, mixing, agitating. In some embodiments the invention employs droplet operation structures and techniques described in, e.g., U.S. Pat. Nos. 6,911,132, 6,773,566, and 6,565,727; U.S. patent application Ser. No. 11/343,284, and U.S. Patent Publication No. 20060254933.

[0266] Droplet digital PCR techniques enable a high density of discrete PCR amplification reactions in a single volume. In some embodiments, greater than 100,000, 500,000, 1,000,000, 1,500,000, 2,000,000, 2,500,000, 5,000,000, or 10,000,000 separate reactions may occur per ul.

### Detection

[0267] Fluorescence detection can be achieved using a variety of detector devices equipped with a module to generate excitation light that can be absorbed by a fluorescer, as well as a module to detect light emitted by the fluorescer. In some cases, samples (such as droplets) may be detected in bulk. For example, samples may be allocated in plastic tubes that are placed in a detector that measures bulk fluorescence from plastic tubes. The samples can be distributed in a monolayer. Monolayer distributed samples can be detected by scanning users high resolution scanners (e.g., microarray scanners, GenePix 4000B Microarray Scanner (Molecular Devices), SureScan Microarray Scanner (Agilent)). If the sample is distributed in multiple layers, the sample can be detected with confocal imaging (e.g., confocal microscopy, spinning-disk confocal microscopy, confocal laser scanning microscopy). In some cases, one or more samples (such as droplets) may be partitioned into one or more wells of a plate, such as a 96-well or 384-well plate, and fluorescence of individual wells may be detected using a fluorescence plate reader.

[0268] In some embodiments amplification of the droplets, e.g., in a thermal cycle results in the generation of one or more detectable signals in a number of droplets. During the amplification reaction, a droplet comprising a template DNA molecule containing an interrogated allele can exhibit an increase in fluorescence relative to droplets that do not contain an interrogated allele. Droplets can be processed individually and fluorescence data collected from the droplets. For example, data relating to fluorescent signals from spectrally distinct fluorophores may be collected from each droplet.

[0269] A number of commercial instruments are available for analysis of fluorescently labeled materials. For instance, the ABI Gene Analyzer can be used to analyze attomole quantities of DNA tagged with fluorophores such as ROX (6-carboxy-X-rhodamine), rhodamine-NHS, TAMRA (5/6-carboxytetramethyl rhodamine NHS), and FAM (5′-carboxyfluorescein NHS). These compounds are attached to the probe by an amide bond through a 5′-alkylamine on the probe. Attachment can also occur through phosphoramidite precursors (e.g., 2-methoxy-3-trifluoroacetyl-1,3,2-oxazaphosphacyclopentane or N-(3-(N′,N′-diisopropylaminomethoxyphosphinyloxy)propyl)-2,2,2-trifluoroacetamide) which is a method to conjugate amino-derivatized polymers, especially oligonucleotides. Other useful fluorophores include CNHS (7-amino-4-methyl-coumarin-3-acetic acid, succinimidyl ester), which can also be attached through an amide bond.

[0270] Following digital PCR, the number of positive samples having a particular allele and the number of positive samples having any other allele (e.g., a wild-type allele) can be counted. In some cases, quantitative determinations are made by measuring the fluorescence intensity of individual partitions, while in other cases, measurements are made by counting the number of partitions containing detectable signal. In some embodiments, control samples can be included to provide background measurements that can be subtracted from all the measurements to account for background fluorescence. In other embodiments, 1, 2, 3, 4, 5, 6, 7, 8, 9, 10, or more than 10 different colors can be used to detect and measure different alleles, such as by using fluorophores of different colors on different PCR primers matched to probes recognizing different sequences.

[0271] In another embodiment of the invention, detection of a hydrolyzed reporter probe can be accomplished using, for example, luminescence (e.g., using Yttrium or Berrilium conjugates of EDTA), time-resolved fluorescence spectroscopy, a technique in which fluorescence is monitored as a function of time after excitation, or fluorescence polarization, a technique to differentiate between large and small molecules based on molecular tumbling. Large molecules (e.g., intact labeled probe) tumble in solution much more slowly than small molecules. Upon linkage of a fluorescent moiety to the molecule of interest (e.g., the 5′ end of a labeled probe), this fluorescent moiety can be measured (and differentiated) based on molecular tumbling, thus differentiating between intact and digested probe. Detection may be measured directly during PCR or may be performed post PCR.

### Kits for Allele Detection

[0272] Also provided in the invention are kits for the detection of one or more alleles of a locus. Kits may include one or more oligonucleotide primers as described herein, wherein each of the primers is capable of selectively detecting an individual allele of a locus. Kits may also include one or more reporter probes, as described herein. Kits can include, for example, one or more primer/probe sets. Exemplary primer/probe sets are described herein. Kits may further comprise instructions for use of the one or more primer/probe sets, e.g., instructions for practicing a method of the invention. In some embodiments, the kit includes a packaging material. As used herein, the term “packaging material” can refer to a physical structure housing the components of the kit. The packaging material can maintain sterility of the kit components, and can be made of material commonly used for such purposes (e.g., paper, corrugated fiber, glass, plastic, foil, ampules, etc.). Kits can also include a buffering agent, a preservative, or a protein/nucleic acid stabilizing agent. Kits can also include other components of a reaction mixture as described herein. For example, kits may include one or more aliquots of thermostable DNA polymerase as described herein, and/or one or more aliquots of dNTPs. Kits can also include control samples of known amounts of template DNA molecules harboring the individual alleles of a locus. In some embodiments, the kit includes a negative control sample, e.g., a sample that does not contain DNA molecules harboring the individual alleles of a locus. In some embodiments, the kit includes a positive control sample, e.g., a sample containing known amounts of one or more of the individual alleles of a locus.

### Systems for Allele Detection

[0273] Also provided in the invention are systems for the detection of one or more alleles in a sample. The system can provide a reaction mixture as described herein. In some embodiments the reaction mixture is admixed with a DNA sample and comprises template DNA. In some embodiments, the system further provides a droplet generator, which partitions the template DNA molecules, probes, primers, and other reaction mixture components into multiple droplets within a water-in-oil emulsion. Examples of some droplet generators useful in the present disclosure are provided in International Application No. PCT/US2009/005317. The system can further provide a thermocycler, which reacts the droplets via, e.g., PCR, to allow amplification and generation of one or more detectable signals. During the amplification reaction, a droplet comprising a template DNA molecule containing an interrogated allele exhibits an increase in fluorescence relative to droplets that do not contain an interrogated allele. In some embodiments, the system further provides a droplet reader, which processes the droplets individually and collects fluorescence data from the droplets. The droplet reader may, for example, detect fluorescent signals from spectrally distinct fluorophores. In some cases, the droplet reader further comprises handling capabilities for droplet samples, with individual droplets entering the detector, undergoing detection, and then exiting the detector. For example, a flow cytometry device can be adapted for use in detecting fluorescence from droplet samples. In some cases, a microfluidic device equipped with pumps to control droplet movement is used to detect fluorescence from droplets in single file. In some cases, droplets are arrayed on a two-dimensional surface and a detector moves relative to the surface, detecting fluorescence at each position containing a single droplet. Exemplary droplet readers useful in the present disclosure are provided in International Application No. PCT/US2009/005317.

[0274] Other exemplary systems for use with the method of the invention is described, for example, PCT Patent Application Pubs. WO 2007/091228 (U.S. Ser. No. 12/092,261); WO 2007/091230 (U.S. Ser. No. 12/093,132); and WO 2008/038259. Systems useful in practicing the invention include, e.g., systems from Stokes Bio (www.stokebio.ie), Fluidigm (www.fluidigm.com), Bio-Rad Laboratories, (www.bio-rad.com) RainDance Technologies (www.raindancetechnologies.com), Microfluidic Systems (www.microfluidicsystems.com); Nanostream (www.nanostream.com); and Caliper Life Sciences (www.caliperls.com). Other exemplary systems suitable for use with the methods of the invention are described, for example, in Zhang et al. Nucleic Acids Res., 35(13):4223-4237 (2007), Wang et al., J. Micromech. Microeng., 15:1369-1377 (2005); Jia et al., 38:2143-2149 (2005); Kim et al., Biochem. Eng. J., 29:91-97; Chen et al., Anal. Chem., 77:658-666; Chen et al., Analyst, 130:931-940 (2005); Munchow et al., Expert Rev. Mol. Diagn., 5:613-620 (2005); and Charbert et al., Anal. Chem., 78:7722-7728 (2006); and Dorfman et al., Anal. Chem., 77:3700-3704 (2005).

[0275] In some embodiments, the system further comprises a computer which stores and processes data. A computer-executable logic may be employed to perform such functions as subtraction of background fluorescence, assignment of target and/or reference sequences, and quantification of the data. For example, the number of droplets containing fluorescence corresponding to the presence of a particular allele (e.g., a mutant allele) in the sample may be counted and compared to the number of droplets containing fluorescence corresponding to the presence of another allele at the locus (such as, e.g., a wild-type allele).

### Subject-Specific Report

[0276] In some embodiments, methods for assessing cancer as described herein further comprise generating a subject-specific report on the tumor profile. The tumor profile can comprise a mutational status of one or more genes in the set of genes sequenced. The method can further comprise generation a subject-specific report on mutational status of the subset of genes over time. The subject-specific report can comprise information on dynamics of the tumor over time, based on a change in the level of cell-free DNA harboring the mutations in the subset of genes over time. An increase over time of cell-free DNA harboring the mutations can indicate an increase in tumor or cancer burden. A decrease over time of cell-free DNA harboring the mutations can indicate a decrease in tumor or cancer burden.

[0277] In some embodiments, the report provides a stratification and/or annotation of treatment options for the subject, based on the subject's tumor-specific profile. The stratification and/or the annotation can be based on clinical information for the subject. The stratification can include ranking drug treatment options with a higher likelihood of efficacy higher than drug treatment options with a lower likelihood of efficacy or for which no information exists with regard to treating subjects with the determined status of the one or more molecular markers. The stratification can include indicating on the report one or more drug treatment options for which scientific information suggests the one or more drug treatment options will be efficacious in a subject, based on the status of one or more tumor-specific mutations from the subject. The stratification can include indicating on a report one or more drug treatment options for which some scientific information suggests the one or more drug treatment options will be efficacious in the subject, and some scientific information suggests the one or more drug treatment options will not be efficacious in the subject, based on the status of one or more tumor-specific mutations in the sample from the subject. The stratification can include indicating on a report one or more drug treatment options for which scientific information indicates the one or more drug treatment options will not be efficacious for the subject, based on the status of one or more tumor-specific mutations in the sample from the subject. The stratification can include color coding the listed drug treatment options on the report based on the rank of the predicted efficacy of the drug treatment options.

[0278] The annotation can include annotation a report for a condition in the NCCN Clinical Practice Guidelines in Oncology™ or the American Society of Clinical Oncology (ASCO) clinical practice guidelines. The annotation can include listing one or more FDA-approved drugs for off-label use, one or more drugs listed in a Centers for Medicare and Medicaid Services (CMS) anti-cancer treatment compendia, and/or one or more experimental drugs found in scientific literature, in the report. The annotation can include connecting a listed drug treatment option to a reference containing scientific information regarding the drug treatment option. The scientific information can be from a peer-reviewed article from a medical journal. The annotation can include using information provided by Ingenuity® Systems. The annotation can include providing a link to information on a clinical trial for a drug treatment option in the report. The annotation can include presenting information in a pop-up box or fly-over box near provided drug treatment options in an electronic based report. The annotation can include adding information to a report selected from the group consisting of one or more drug treatment options, scientific information concerning one or more drug treatment options, one or more links to scientific information regarding one or more drug treatment options, one or more links to citations for scientific information regarding one or more drug treatment options, and clinical trial information regarding one or more drug treatment options. An exemplary embodiment of a subject-specific report is depicted in FIG. 8.

### Computer Systems

[0279] In another aspect, the invention provides computer systems for the monitoring of a cancer, generating a subject report, and/or communicating the report to a caregiver. In some embodiments, the invention provides computer systems for determining prognosis or determining efficacy of a therapy for a cancer in a subject in need thereof. The computer system can provide a report communicating said prognosis or therapy efficacy for said cancer. In some embodiments, the computer system executes instructions contained in a computer-readable medium. In some embodiments, the processor is associated with one or more controllers, calculation units, and/or other units of a computer system, or implanted in firmware. In some embodiments, one or more steps of the method are implemented in hardware. In some embodiments, one or more steps of the method are implemented in software. Software routines may be stored in any computer readable memory unit such as flash memory, RAM, ROM, magnetic disk, laser disk, or other storage medium as described herein or known in the art. Software may be communicated to a computing device by any known communication method including, for example, over a communication channel such as a telephone line, the internet, a wireless connection, or by a transportable medium, such as a computer readable disk, flash drive, etc. The one or more steps of the methods described herein may be implemented as various operations, tools, blocks, modules and techniques which, in turn, may be implemented in firmware, hardware, software, or any combination of firmware, hardware, and software. When implemented in hardware, some or all of the blocks, operations, techniques, etc. may be implemented in, for example, an application specific integrated circuit (ASIC), custom integrated circuit (IC), field programmable logic array (FPGA), or programmable logic array (PLA).

[0280] FIG. 9 depicts a computer system 900 adapted to enable a user to detect, analyze, and process patient data. The system 900 includes a central computer server 901 that is programmed to implement exemplary methods described herein. The server 901 includes a central processing unit (CPU, also “processor”) 905 which can be a single core processor, a multi core processor, or plurality of processors for parallel processing. The server 901 also includes memory 910 (e.g. random access memory, read-only memory, flash memory); electronic storage unit 915 (e.g. hard disk); communications interface 920 (e.g. network adaptor) for communicating with one or more other systems; and peripheral devices 925 which may include cache, other memory, data storage, and/or electronic display adaptors. The memory 910, storage unit 915, interface 920, and peripheral devices 925 are in communication with the processor 905 through a communications bus (solid lines), such as a motherboard. The storage unit 915 can be a data storage unit for storing data. The server 901 is operatively coupled to a computer network (“network”) 930 with the aid of the communications interface 920. The network 930 can be the Internet, an intranet and/or an extranet, an intranet and/or extranet that is in communication with the Internet, a telecommunication or data network. The network 930 in some cases, with the aid of the server 901, can implement a peer-to-peer network, which may enable devices coupled to the server 901 to behave as a client or a server.

[0281] The storage unit 915 can store files, such as subject reports, and/or communications with the caregiver, sequencing data, data about individuals, or any aspect of data associated with the invention.

[0282] The server can communicate with one or more remote computer systems through the network 930. The one or more remote computer systems may be, for example, personal computers, laptops, tablets, telephones, Smart phones, or personal digital assistants.

[0283] In some situations the system 900 includes a single server 901. In other situations, the system includes multiple servers in communication with one another through an intranet, extranet and/or the Internet.

[0284] The server 901 can be adapted to store sequencing information, or patient information, such as, for example, polymorphisms, mutations, patient history and demographic data and/or other information of potential relevance. Such information can be stored on the storage unit 915 or the server 901 and such data can be transmitted through a network.

[0285] Methods as described herein can be implemented by way of machine (or computer processor) executable code (or software) stored on an electronic storage location of the server 901, such as, for example, on the memory 910, or electronic storage unit 915. During use, the code can be executed by the processor 905. In some cases, the code can be retrieved from the storage unit 915 and stored on the memory 910 for ready access by the processor 905. In some situations, the electronic storage unit 915 can be precluded, and machine-executable instructions are stored on memory 910. Alternatively, the code can be executed on a second computer system 940.

[0286] Aspects of the systems and methods provided herein, such as the server 901, can be embodied in programming. Various aspects of the technology may be thought of as “products” or “articles of manufacture” typically in the form of machine (or processor) executable code and/or associated data that is carried on or embodied in a type of machine readable medium. Machine-executable code can be stored on an electronic storage unit, such memory (e.g., read-only memory, random-access memory, flash memory) or a hard disk. “Storage” type media can include any or all of the tangible memory of the computers, processors or the like, or associated modules thereof, such as various semiconductor memories, tape drives, disk drives and the like, which may provide non-transitory storage at any time for the software programming. All or portions of the software may at times be communicated through the Internet or various other telecommunication networks. Such communications, for example, may enable loading of the software from one computer or processor into another, for example, from a management server or host computer into the computer platform of an application server. Thus, another type of media that may bear the software elements includes optical, electrical, and electromagnetic waves, such as used across physical interfaces between local devices, through wired and optical landline networks and over various air-links. The physical elements that carry such waves, such as wired or wireless likes, optical links, or the like, also may be considered as media bearing the software. As used herein, unless restricted to non-transitory, tantible “storage” media, terms such as computer or machine “readable medium” can refer to any medium that participates in providing instructions to a processor for execution.

[0287] Hence, a machine readable medium, such as computer-executable code, may take many forms, including but not limited to, tangible storage medium, a carrier wave medium, or physical transmission medium. Non-volatile storage media can include, for example, optical or magnetic disks, such as any of the storage devices in any computer(s) or the like, such may be used to implement the system. Tangible transmission media can include: coaxial cables, copper wires, and fiber optics (including the wires that comprise a bus within a computer system). Carrier-wave transmission media may take the form of electric or electromagnetic signals, or acoustic or light waves such as those generated during radio frequency (RF) and infrared (IR) data communications. Common forms of computer-readable media therefore include, for example: a floppy disk, a flexible disk, hard disk, magnetic tape, any other magnetic medium, a CD-ROM, DVD, DVD-ROM, any other optical medium, punch cards, paper tame, any other physical storage medium with patterns of holes, a RAM, a ROM, a PROM and EPROM, a FLASH-EPROM, any other memory chip or cartridge, a carrier wave transporting data or instructions, cables, or links transporting such carrier wave, or any other medium from which a computer may read programming code and/or data. Many of these forms of computer readable media may be involved in carrying one or more sequences of one or more instructions to a processor for execution.

[0288] The results of monitoring of a cancer, generating a subject report, and/or communicating the report to a caregiver can be presented to a user with the aid of a user interface, such as a graphical user interface.

[0289] A computer system may be used for one or more steps, including, e.g., sample collection, sample processing, sequencing, allele detection, receiving patient history or medical records, receiving and storing measurement data regarding a detected level of tumor-specific mutations in a subject or sample obtained from a subject, analyzing said measurement data determine a diagnosis, prognosis, or therapeutic efficacy, generating a report, and reporting results to a receiver.

[0290] A client-server and/or relational database architecture can be used in the invention. In general, a client-server architecture is a network architecture in which each computer or process on the network is either a client or a server. Server computers can be powerful computers dedicated to managing disk drives (file servers), printers (print servers), or network traffic (network servers). Client computers can include PCs (personal computers) or workstations on which users run applications, as well as example output devices as disclosed herein. Client computers can rely on server computers for resources, such as files, devices, and even processing power. The server computer handles all of the database functionality. The client computer can have software that handles front-end data management and receive data input from users.

[0291] After performing a calculation, a processor can provide the output, such as from a calculation, back to, for example, the input device or storage unit, to another storage unit of the same or different computer system, or to an output device. Output from the processor can be displayed by a data display, e.g., a display screen (for example, a monitor or a screen on a digital device), a print-out, a data signal (for example, a packet), a graphical user interface (for example, a webpage), an alarm (for example, a flashing light or a sound), or a combination of any of the above. In an embodiment, an output is transmitted over a network (for example, a wireless network) to an output device. The output device can be used by a user to receive the output from the data-processing computer system. After an output has been received by a user, the user can determine a course of action, or can carry out a course of action, such as a medical treatment when the user is medical personnel. In some embodiments, an output device is the same device as the input device. Example output devices include, but are not limited to, a telephone, a wireless telephone, a mobile phone, a PDA, a flash memory drive, a light source, a sound generator, a fax machine, a computer, a computer monitor, a printer, an iPod, and a webpage. The user station may be in communication with a printer or a display monitor to output the information processed by the server. Such displays, output devices, and user stations can be used to provide an alert to the subject or to a caregiver thereof.

[0292] Data relating to the present disclosure can be transmitted over a network or connections for reception and/or review by a receiver. The receiver can be but is not limited to the subject to whom the report pertains; or to a caregiver thereof, e.g., a health care provider, manager, other healthcare professional, or other caretaker; a person or entity that performed and/or ordered the genotyping analysis; a genetic counselor. The receiver can also be a local or remote system for storing such reports (e.g. servers or other systems of a “cloud computing” architecture). In one embodiment, a computer-readable medium includes a medium suitable for transmission of a result of an analysis of a biological sample.

[0293] An exemplary embodiment of a subject-specific report is depicted in FIG. 8. The computer system can comprise a user accessible module which enables the ability for clinicians to request a service be performed. Clinicians can enter patient demographic and medical history information into the computer system. The computer system can process the entered information and create a barcode label that can be applied to the sample being analyzed. The barcoded-sample be sent for analysis to a third party analyzer. The barcoded information would be inaccessible to the third party analyzer to maintain accountability with The Health Insurance Portability and Accountability Act (HIPAA) compliancy. Information that can be anonymized can be accessible to the third party analyzer. The barcode can be used to track the progression of the sample through the analysis workflow resulting in the generation of an encrypted final report. The encrypted final report can be decrypted and made accessible to the clinician who originally entered the sample information.

### EXAMPLES

### Example 1

[0294] FIG. 10 depicts a method used to assess a cancer in a subject. A subject had a colonoscopy and is discovered to harbor a colon tumor. A tumor biopsy and blood draw were collected from the subject at time point 0, and are used to aid in the diagnosis of colon cancer in the subject. The tumor and normal cells from the first blood draw were sequenced. Sequencing revealed the presence of three mutations in the subject's tumor. The mutations were point mutations in the APC, KRAS, and TP53 genes. The stage of the subject's cancer was determined. The subject underwent a first treatment (surgery) to remove the tumor. Upon the first treatment, a second blood draw was performed. It was determined that the subject's tumor had metastasized. The subject was administered as second therapy (chemotherapy) to manage the cancer. Subsequent blood draws are performed to assay the mutational status of the three genes in cell-free DNA from the blood.

### Example 2

### Validation Assay for a Tumor-Specific Mutation in the Subject with Colon Cancer

[0295] NCI-H1573 (CRL-5877) cell lines harboring the KRAS G12A mutation (mu) were obtained as frozen stocks from the American Type Culture Collection (ATCC). Genomic DNA (gDNA) was prepared from cell line material using a commercially available kit (DNeasy Blood & Tissue kit, QIAGEN), according to the manufacturer's suggested protocol. Estimates of DNA concentration were obtained spectrophotometrically by measuring the OD₂₆₀ (NanoDrop 1000, Thermo Fisher Scientific Inc.).

[0296] Genomic DNA from NA18507 cell lines was used as a surrogate for wild-type DNA (wt) and obtained as purified stocks (Coriell). Two microliters of a mixture containing wt (30 ng) and mu (6 ng) DNA was assembled into a 20 μl ddPCR reaction mix from 2×ddPCR supermix for probes, 0.2 uM final of each forward primer (wt: 5′-AGATTACGCGGCAATAAGGCTCGGTTGGCATTGGATACTACTTGCCTACGCCACC-3′; mu: 5′AATAGCTGCCTACATTGGGTTCGGTCGTAACTTAGGAACTCTTGCCTACGCCAGC-3′), 0.4 uM of reverse primer (5′-CCTGCTGAAaAATGACTGAAT-3′), and 1 uM each of reporter probes (wt: 5′-HEX-CCAACCGAG/ZEN/CCTTATTGCCG-IABkFQ-3′; mu: 5′-FAM-AGTTACGAC/ZEN/CGAACCCAATGTAGG-IABkFQ-3′). Each PCR mixture was then converted into droplets for analysis via the QX100 ddPCR system according to the manufacturer's suggestions. Annealing temperature was varied to determine the optimal conditions for segregating and quantifying the wt (HEX) and mu (FAM) droplet signals (FIG. 11). Resulting clusters were deconvoluted (FIG. 12) by using ddPCR mixtures containing only the mu (12A), only the wt (12B), or both probes (12C) to assign membership of each cluster as mu or wt.

[0297] While preferred embodiments of the present invention have been shown and described herein, it will be obvious to those skilled in the art that such embodiments are provided by way of example only. Numerous variations, changes, and substitutions will now occur to those skilled in the art without departing from the invention. It should be understood that various alternatives to the embodiments of the invention described herein may be employed in practicing the invention. It is intended that the following claims define the scope of the invention and that methods and structures within the scope of these claims and their equivalents be covered thereby.

The application's sequence listing, which the Patent Office published only in electronic form, follows.

SEQUENCE LISTING (5593 sequences)

SEQ ID NO: 1 - DNA, 55 bp, Artificial Sequence
  Description of Artificial Sequence: Synthetic primer
agattacgcggcaataaggctcggttggcattggatactacttgcctacgccacc

SEQ ID NO: 2 - DNA, 55 bp, Artificial Sequence
  Description of Artificial Sequence: Synthetic primer
aatagctgcctacattgggttcggtcgtaacttaggaactcttgcctacgccagc

SEQ ID NO: 3 - DNA, 21 bp, Artificial Sequence
  Description of Artificial Sequence: Synthetic primer
cctgctgaaaaatgactgaat

SEQ ID NO: 4 - DNA, 20 bp, Artificial Sequence
  Description of Artificial Sequence: Synthetic probe
  5' HEX
  misc_feature (9)..(10): ZEN quencher between nucleotides
  3' IABkFQ
ccaaccgagccttattgccg

SEQ ID NO: 5 - DNA, 24 bp, Artificial Sequence
  Description of Artificial Sequence: Synthetic probe
  5' FAM
  misc_feature (9)..(10): ZEN quencher between nucleotides
  3' IABkFQ
agttacgaccgaacccaatgtagg

SEQ ID NO: 6 - DNA, 30 bp, Artificial Sequence
  Description of Artificial Sequence: Synthetic probe
  5' HEX
  3' IBlkFq
accctgcaaatagcagaaataaaagaaaag

SEQ ID NO: 7 - DNA, 30 bp, Artificial Sequence
  Description of Artificial Sequence: Synthetic probe
  5' FAM
  3' IBlkFq
accctgcaaatagcataaataaaagaaaag

SEQ ID NO: 8 - DNA, 16 bp, Artificial Sequence
  Description of Artificial Sequence: Synthetic probe
  5' MGB-AP525
ttatttctgctatttg

SEQ ID NO: 9 - DNA, 17 bp, Artificial Sequence
  Description of Artificial Sequence: Synthetic probe
  5' MGB-FAM
  modified_base (15)..(16): Superbase nucleotide
tttatttatgctatttg

SEQ ID NO: 10 - DNA, 16 bp, Artificial Sequence
  Description of Artificial Sequence: Synthetic probe
  5' MGB-AP525
  modified_base (13)..(15): Superbase nucleotide
ttatttctgctatttg

SEQ ID NO: 11 - DNA, 18 bp, Artificial Sequence
  Description of Artificial Sequence: Synthetic probe
  5' MGB-FAM
  modified_base (13)..(13): Superbase nucleotide
  modified_base (16)..(16): Superbase nucleotide
tttatttatgctatttgc

SEQ ID NO: 12 - DNA, 17 bp, Artificial Sequence
  Description of Artificial Sequence: Synthetic probe
  5' MGB-AP525
  modified_base (13)..(15): Superbase nucleotide
ttatttctgctatttgc

SEQ ID NO: 13 - DNA, 18 bp, Artificial Sequence
  Description of Artificial Sequence: Synthetic probe
  5' MGB-FAM
  modified_base (5)..(6): Superbase nucleotide
  modified_base (13)..(13): Superbase nucleotide
  modified_base (15)..(16): Superbase nucleotide
tttatttatgctatttgc

SEQ ID NO: 14 - DNA, 11 bp, Artificial Sequence
  Description of Artificial Sequence: Synthetic probe
  5' MGB-FAM
  modified_base (5)..(5): Superbase nucleotide
  modified_base (11)..(11): Superbase nucleotide
ttatttatgct

SEQ ID NO: 15 - DNA, 11 bp, Artificial Sequence
  Description of Artificial Sequence: Synthetic probe
  5' MGB-AP525
ttatttctgct

SEQ ID NO: 16 - DNA, 10 bp, Artificial Sequence
  Description of Artificial Sequence: Synthetic probe
  5' MGB-AP525
ttatttctgc

SEQ ID NO: 17 - DNA, 10 bp, Artificial Sequence
  Description of Artificial Sequence: Synthetic probe
  5' MGB-FAM
  modified_base (5)..(5): Superbase nucleotide
ttatttatgc

SEQ ID NO: 18 - DNA, 22 bp, Artificial Sequence
  Description of Artificial Sequence: Synthetic probe
  5' 5HEX
  3' 3IABkFQ
aagttactatcagcccttcctg

SEQ ID NO: 19 - DNA, 25 bp, Artificial Sequence
  Description of Artificial Sequence: Synthetic probe
  5' 56-FAM
  3' 3IABkFQ
tgatactgttcagaggtggtgctag

SEQ ID NO: 20 - DNA, 15 bp, Artificial Sequence
  Description of Artificial Sequence: Synthetic probe
  5' 5HEX
  3' 3IABkFQ
tttactatcagcctt

SEQ ID NO: 21 - DNA, 16 bp, Artificial Sequence
  Description of Artificial Sequence: Synthetic probe
  5' 56-FAM
  3' 3IABkFQ
ttactgatactgtttt

SEQ ID NO: 22 - DNA, 20 bp, Artificial Sequence
  Description of Artificial Sequence: Synthetic primer
catgaagacctcacagtaaa

SEQ ID NO: 23 - DNA, 12 bp, Artificial Sequence
  Description of Artificial Sequence: Synthetic probe
  5' HEX
  3' BHQ
taaggctcggtt

SEQ ID NO: 24 - DNA, 12 bp, Artificial Sequence
  Description of Artificial Sequence: Synthetic probe
  5' FAM
  3' BHQ
ttgggttcggtc

SEQ ID NO: 25 - DNA, 25 bp, Artificial Sequence
  Description of Artificial Sequence: Synthetic primer
ggcaataaggctcggttggcattgg

SEQ ID NO: 26 - DNA, 27 bp, Artificial Sequence
  Description of Artificial Sequence: Synthetic primer
acattgggttcggtcgtaacttaggaa

SEQ ID NO: 27 - DNA, 44 bp, Artificial Sequence
  Description of Artificial Sequence: Synthetic primer
ggcaataaggctcggttggcattggcactccatcgagatttcac

SEQ ID NO: 28 - DNA, 44 bp, Artificial Sequence
  Description of Artificial Sequence: Synthetic primer
ggcaataaggctcggttggcattggcactccatcgagatttaac

SEQ ID NO: 29 - DNA, 44 bp, Artificial Sequence
  Description of Artificial Sequence: Synthetic primer
ggcaataaggctcggttggcattggcactccatcgagatttgac

SEQ ID NO: 30 - DNA, 44 bp, Artificial Sequence
  Description of Artificial Sequence: Synthetic primer
ggcaataaggctcggttggcattggcactccatcgagattttac

SEQ ID NO: 31 - DNA, 44 bp, Artificial Sequence; identical to SEQ ID NO: 27
  Description of Artificial Sequence: Synthetic primer

SEQ ID NO: 32 - DNA, 44 bp, Artificial Sequence
  Description of Artificial Sequence: Synthetic primer
ggcaataaggctcggttggcattggcactccatcgagattacac

SEQ ID NO: 33 - DNA, 44 bp, Artificial Sequence
  Description of Artificial Sequence: Synthetic primer
ggcaataaggctcggttggcattggcactccatcgagattccac

SEQ ID NO: 34 - DNA, 44 bp, Artificial Sequence
  Description of Artificial Sequence: Synthetic primer
ggcaataaggctcggttggcattggcactccatcgagattgcac

SEQ ID NO: 35 - DNA, 44 bp, Artificial Sequence
  Description of Artificial Sequence: Synthetic primer
ggcaataaggctcggttggcattggccactccatcgagatttca

SEQ ID NO: 36 - DNA, 44 bp, Artificial Sequence
  Description of Artificial Sequence: Synthetic primer
ggcaataaggctcggttggcattggccactccatcgagatttaa

SEQ ID NO: 37 - DNA, 44 bp, Artificial Sequence
  Description of Artificial Sequence: Synthetic primer
ggcaataaggctcggttggcattggccactccatcgagatttga

SEQ ID NO: 38 - DNA, 44 bp, Artificial Sequence
  Description of Artificial Sequence: Synthetic primer
ggcaataaggctcggttggcattggccactccatcgagatttta

SEQ ID NO: 39 - DNA, 44 bp, Artificial Sequence; identical to SEQ ID NO: 35
  Description of Artificial Sequence: Synthetic primer

SEQ ID NO: 40 - DNA, 44 bp, Artificial Sequence
  Description of Artificial Sequence: Synthetic primer
ggcaataaggctcggttggcattggccactccatcgagattaca

SEQ ID NO: 41 - DNA, 44 bp, Artificial Sequence
  Description of Artificial Sequence: Synthetic primer
ggcaataaggctcggttggcattggccactccatcgagattcca

SEQ ID NO: 42 - DNA, 44 bp, Artificial Sequence
  Description of Artificial Sequence: Synthetic primer
ggcaataaggctcggttggcattggccactccatcgagattgca

SEQ ID NO: 43 - DNA, 46 bp, Artificial Sequence
  Description of Artificial Sequence: Synthetic primer
acattgggttcggtcgtaacttaggaacactccatcgagatttctc

SEQ ID NO: 44 - DNA, 46 bp, Artificial Sequence
  Description of Artificial Sequence: Synthetic primer
acattgggttcggtcgtaacttaggaacactccatcgagatttatc

SEQ ID NO: 45 - DNA, 46 bp, Artificial Sequence
  Description of Artificial Sequence: Synthetic primer
acattgggttcggtcgtaacttaggaacactccatcgagatttgtc

SEQ ID NO: 46 - DNA, 46 bp, Artificial Sequence
  Description of Artificial Sequence: Synthetic primer
acattgggttcggtcgtaacttaggaacactccatcgagatttttc

SEQ ID NO: 47 - DNA, 46 bp, Artificial Sequence; identical to SEQ ID NO: 43
  Description of Artificial Sequence: Synthetic primer

SEQ ID NO: 48 - DNA, 46 bp, Artificial Sequence
  Description of Artificial Sequence: Synthetic primer
acattgggttcggtcgtaacttaggaacactccatcgagattactc

SEQ ID NO: 49 - DNA, 46 bp, Artificial Sequence
  Description of Artificial Sequence: Synthetic primer
acattgggttcggtcgtaacttaggaacactccatcgagattcctc

SEQ ID NO: 50 - DNA, 46 bp, Artificial Sequence
  Description of Artificial Sequence: Synthetic primer
acattgggttcggtcgtaacttaggaacactccatcgagattgctc

SEQ ID NO: 51 - DNA, 46 bp, Artificial Sequence
  Description of Artificial Sequence: Synthetic primer
acattgggttcggtcgtaacttaggaaccactccatcgagatttct

SEQ ID NO: 52 - DNA, 46 bp, Artificial Sequence
  Description of Artificial Sequence: Synthetic primer
acattgggttcggtcgtaacttaggaaccactccatcgagatttat

SEQ ID NO: 53 - DNA, 46 bp, Artificial Sequence
  Description of Artificial Sequence: Synthetic primer
acattgggttcggtcgtaacttaggaaccactccatcgagatttgt

SEQ ID NO: 54 - DNA, 46 bp, Artificial Sequence
  Description of Artificial Sequence: Synthetic primer
acattgggttcggtcgtaacttaggaaccactccatcgagattttt

SEQ ID NO: 55 - DNA, 46 bp, Artificial Sequence; identical to SEQ ID NO: 51
  Description of Artificial Sequence: Synthetic primer

SEQ ID NO: 56 - DNA, 46 bp, Artificial Sequence
  Description of Artificial Sequence: Synthetic primer
acattgggttcggtcgtaacttaggaaccactccatcgagattact

SEQ ID NO: 57 - DNA, 46 bp, Artificial Sequence
  Description of Artificial Sequence: Synthetic primer
acattgggttcggtcgtaacttaggaaccactccatcgagattcct

SEQ ID NO: 58 - DNA, 46 bp, Artificial Sequence
  Description of Artificial Sequence: Synthetic primer
acattgggttcggtcgtaacttaggaaccactccatcgagattgct

SEQ ID NO: 59 - DNA, 30 bp, Artificial Sequence
  Description of Artificial Sequence: Synthetic primer
  modified_base (17)..(18): Superbase nucleotide
  modified_base (22)..(22): Superbase nucleotide
aataaatcataaggtcttgccagagacatg

SEQ ID NO: 60 - DNA, 27 bp, Artificial Sequence
  Description of Artificial Sequence: Synthetic primer
cagctttgcacctgttttgttgtgtac

SEQ ID NO: 61 - DNA, 11 bp, Artificial Sequence
  Description of Artificial Sequence: Synthetic probe
  modified_base (7)..(7): Superbase nucleotide
  modified_base (10)..(10): Superbase nucleotide
gaatactatag

SEQ ID NO: 62 - DNA, 31 bp, Artificial Sequence
  Description of Artificial Sequence: Synthetic primer
  modified_base (14)..(14): Superbase nucleotide
aataaatcataacacctcgatgtgctttagc

SEQ ID NO: 63 - DNA, 23 bp, Artificial Sequence
  Description of Artificial Sequence: Synthetic primer
  modified_base (5)..(5): Superbase nucleotide
gttcatgtgtaaggtgtacagtg

SEQ ID NO: 64 - DNA, 11 bp, Artificial Sequence
  Description of Artificial Sequence: Synthetic probe
  modified_base (6)..(6): Superbase nucleotide
actggatgtgc

SEQ ID NO: 65 - DNA, 22 bp, Artificial Sequence
  Description of Artificial Sequence: Synthetic primer
gtggtcggaggagacgtagagt

SEQ ID NO: 66 - DNA, 27 bp, Artificial Sequence
  Description of Artificial Sequence: Synthetic primer
aataaatcataactggatgtggggctg

SEQ ID NO: 67 - DNA, 11 bp, Artificial Sequence
  Description of Artificial Sequence: Synthetic probe
tacagtgatgc

SEQ ID NO: 68 - DNA, 32 bp, Artificial Sequence
  Description of Artificial Sequence: Synthetic primer
  modified_base (14)..(14): Superbase nucleotide
  modified_base (19)..(19): Superbase nucleotide
  modified_base (23)..(24): Superbase nucleotide
aataaatcataagacaacatagttggaatcac

SEQ ID NO: 69 - DNA, 25 bp, Artificial Sequence
  Description of Artificial Sequence: Synthetic primer
  modified_base (5)..(5): Superbase nucleotide
  modified_base (15)..(15): Superbase nucleotide
ggtgaagatatgtgactttggattg

SEQ ID NO: 70 - DNA, 12 bp, Artificial Sequence
  Description of Artificial Sequence: Synthetic probe
catgatatctcg

SEQ ID NO: 71 - DNA, 22 bp, Artificial Sequence
  Description of Artificial Sequence: Synthetic primer
  modified_base (5)..(7): Superbase nucleotide
gaagtttgccatcttcgtcatg

SEQ ID NO: 72 - DNA, 28 bp, Artificial Sequence
  Description of Artificial Sequence: Synthetic primer
aataaatcataacggagctggcgcagag

SEQ ID NO: 73 - DNA, 11 bp, Artificial Sequence
  Description of Artificial Sequence: Synthetic probe
actccagccac

SEQ ID NO: 74 - DNA, 33 bp, Artificial Sequence
  Description of Artificial Sequence: Synthetic primer
  modified_base (14)..(14): Superbase nucleotide
  modified_base (20)..(20): Superbase nucleotide
  modified_base (22)..(22): Superbase nucleotide
aataaatcataacagcatgtcaagatcacagat

SEQ ID NO: 75 - DNA, 21 bp, Artificial Sequence
  Description of Artificial Sequence: Synthetic primer
  modified_base (8)..(10): Superbase nucleotide
ggtattctttctcttccgcac

SEQ ID NO: 76 - DNA, 20 bp, Artificial Sequence
  Description of Artificial Sequence: Synthetic probe
caaactgctgttgggctggc

SEQ ID NO: 77 - DNA, 30 bp, Artificial Sequence
  Description of Artificial Sequence: Synthetic primer
aataaatcataactgctggaccagggtgtt

SEQ ID NO: 78 - DNA, 25 bp, Artificial Sequence
  Description of Artificial Sequence: Synthetic primer
gcacaatgcagccaacaagattctg

SEQ ID NO: 79 - DNA, 12 bp, Artificial Sequence
  Description of Artificial Sequence: Synthetic probe
tcacacatgttc

SEQ ID NO: 80 - DNA, 31 bp, Artificial Sequence
  Description of Artificial Sequence: Synthetic primer
aataaatcataaccagtgcagtcggtggtac

SEQ ID NO: 81 - DNA, 30 bp, Artificial Sequence
  Description of Artificial Sequence: Synthetic primer
aataaatcataacagcagctgtgctcccga

SEQ ID NO: 82 - DNA, 11 bp, Artificial Sequence
  Description of Artificial Sequence: Synthetic probe
  modified_base (7)..(7): Superbase nucleotide
ctgagatggag

SEQ ID NO: 83 - DNA, 30 bp, Artificial Sequence
  Description of Artificial Sequence: Synthetic primer
aataaatcataaccttgtccccaggaagca

SEQ ID NO: 84 - DNA, 30 bp, Artificial Sequence
  Description of Artificial Sequence: Synthetic primer
  modified_base (25)..(25): Superbase nucleotide
aataaatcataagggagacatatggggagc

SEQ ID NO: 85 - DNA, 10 bp, Artificial Sequence
  Description of Artificial Sequence: Synthetic probe
tgatggctgg

SEQ ID NO: 86 - DNA, 21 bp, Artificial Sequence
  Description of Artificial Sequence: Synthetic primer
  modified_base (5)..(5): Superbase nucleotide
  modified_base (9)..(9): Superbase nucleotide
ctttagggtcggattccagtt

SEQ ID NO: 87 - DNA, 31 bp, Artificial Sequence
  Description of Artificial Sequence: Synthetic primer
  modified_base (15)..(15): Superbase nucleotide
  modified_base (18)..(18): Superbase nucleotide
  modified_base (23)..(23): Superbase nucleotide
  modified_base (28)..(28): Superbase nucleotide
aataaatcataacgtggtgtagatatgatca

SEQ ID NO: 88 - DNA, 10 bp, Artificial Sequence
  Description of Artificial Sequence: Synthetic probe
aatggatggc

SEQ ID NO: 89 - DNA, 23 bp, Artificial Sequence
  Description of Artificial Sequence: Synthetic primer
  modified_base (12)..(12): Superbase nucleotide
  modified_base (18)..(18): Superbase nucleotide
aggaagggctgatagtaacttag

SEQ ID NO: 90 - DNA, 29 bp, Artificial Sequence
  Description of Artificial Sequence: Synthetic primer
aataaatcataacagaagccggagctgga

SEQ ID NO: 91 - DNA, 11 bp, Artificial Sequence
  Description of Artificial Sequence: Synthetic probe
gtacccttgga

SEQ ID NO: 92 - DNA, 30 bp, Artificial Sequence
  Description of Artificial Sequence: Synthetic primer
  modified_base (16)..(16): Inosine superbase
aataaatcataactcnacgatggcttccac

SEQ ID NO: 93 - DNA, 29 bp, Artificial Sequence
  Description of Artificial Sequence: Synthetic primer
aataaatcataagatgcagcctccgttgt

SEQ ID NO: 94 - DNA, 12 bp, Artificial Sequence
  Description of Artificial Sequence: Synthetic probe
accaagtctgtg

SEQ ID NO: 95 - DNA, 31 bp, Artificial Sequence
  Description of Artificial Sequence: Synthetic primer
  modified_base (15)..(15): Inosine superbase
  modified_base (18)..(18): Superbase nucleotide
aataaatcataactnccatggactctctcga

SEQ ID NO: 96 - DNA, 25 bp, Artificial Sequence
  Description of Artificial Sequence: Synthetic primer
gagtttggagcaggatgtgaagaag

SEQ ID NO: 97 - DNA, 11 bp, Artificial Sequence
  Description of Artificial Sequence: Synthetic probe
tccaacatgtc

SEQ ID NO: 98 - DNA, 30 bp, Artificial Sequence
  Description of Artificial Sequence: Synthetic primer
aataaatcataatgcgtacatcgctggagg

SEQ ID NO: 99 - DNA, 24 bp, Artificial Sequence
  Description of Artificial Sequence: Synthetic primer
  modified_base (4)..(4): Inosine superbase
  modified_base (9)..(9): Inosine superbase
  modified_base (16)..(18): Superbase nucleotide
gganatctnaatcagtttctttcc

SEQ ID NO: 100 - DNA, 10 bp, Artificial Sequence
  Description of Artificial Sequence: Synthetic probe
agaattaggg

SEQ ID NO: 101 - DNA, 30 bp, Artificial Sequence
  Description of Artificial Sequence: Synthetic primer
  modified_base (13)..(13): Inosine superbase
  modified_base (18)..(20): Superbase nucleotide
  modified_base (23)..(23): Inosine superbase
aataaatcataantgcatttcangacctgt

SEQ ID NO: 102 - DNA, 28 bp, Artificial Sequence
  Description of Artificial Sequence: Synthetic primer
  modified_base (7)..(7): Superbase nucleotide
  modified_base (16)..(16): Superbase nucleotide
  modified_base (20)..(20): Superbase nucleotide
gggtttataaatgtgaatgagattacag

SEQ ID NO: 103 - DNA, 12 bp, Artificial Sequence
  Description of Artificial Sequence: Synthetic probe
  modified_base (11)..(12): Superbase nucleotide
taaattgaataa

SEQ ID NO: 104 - DNA, 25 bp, Artificial Sequence
  Description of Artificial Sequence: Synthetic primer
gtggtgaagttcatggatgtctatc

SEQ ID NO: 105 - DNA, 31 bp, Artificial Sequence
  Description of Artificial Sequence: Synthetic primer
aataaatcataaccaccagggtctcgattgg

SEQ ID NO: 106 - DNA, 12 bp, Artificial Sequence
  Description of Artificial Sequence: Synthetic probe
gctactgccatc

SEQ ID NO: 107 - DNA, 29 bp, Artificial Sequence
  Description of Artificial Sequence: Synthetic primer
catgtcgatcaagacttgaccacttactt

SEQ ID NO: 108 - DNA, 29 bp, Artificial Sequence
  Description of Artificial Sequence: Synthetic primer
aataaatcataatcagtgggcactccagg

SEQ ID NO: 109 - DNA, 11 bp, Artificial Sequence
  Description of Artificial Sequence: Synthetic probe
taaagttccag

SEQ ID NO: 110 - DNA, 24 bp, Artificial Sequence
  Description of Artificial Sequence: Synthetic primer
caagctttctcacaagcatttggt

SEQ ID NO: 111 - DNA, 31 bp, Artificial Sequence
  Description of Artificial Sequence: Synthetic primer
  modified_base (16)..(16): Superbase nucleotide
aataaatcataacttactctcgtctccacag

SEQ ID NO: 112 - DNA, 12 bp, Artificial Sequence
  Description of Artificial Sequence: Synthetic probe
ggagtatgtgtc

SEQ ID NO: 113 - DNA, 24 bp, Artificial Sequence
  Description of Artificial Sequence: Synthetic primer
gacaactgttcaaactgatgggac

SEQ ID NO: 114 - DNA, 32 bp, Artificial Sequence
  Description of Artificial Sequence: Synthetic primer
  modified_base (19)..(21): Superbase nucleotide
aataaatcataaggtgattttggtctagctac

SEQ ID NO: 115 - DNA, 11 bp, Artificial Sequence
  Description of Artificial Sequence: Synthetic probe
atttcactgta

SEQ ID NO: 116 - DNA, 21 bp, Artificial Sequence
  Description of Artificial Sequence: Synthetic primer
cggttactgctcaatgcagag

SEQ ID NO: 117 - DNA, 32 bp, Artificial Sequence
  Description of Artificial Sequence: Synthetic primer
  modified_base (14)..(14): Inosine superbase
  modified_base (29)..(29): Inosine superbase
aataaatcataacntggtctcactttctngca

SEQ ID NO: 118 - DNA, 10 bp, Artificial Sequence
  Description of Artificial Sequence: Synthetic probe
aacccgagag

SEQ ID NO: 119 - DNA, 25 bp, Artificial Sequence
  Description of Artificial Sequence: Synthetic oligonucleotide
aatgccatcatgtcggtatcgcagc

SEQ ID NO: 120 - DNA, 25 bp, Artificial Sequence
  Description of Artificial Sequence: Synthetic oligonucleotide
actgccatcaggtcggtatagtagc

SEQ ID NO: 121 - DNA, 29 bp, Artificial Sequence
  Description of Artificial Sequence: Synthetic oligonucleotide
aatgatacggcgaccaccgagatctacac

SEQ ID NO: 122 - DNA, 33 bp, Artificial Sequence
  Description of Artificial Sequence: Synthetic oligonucleotide
acactctttccctacacgacgctcttccgatct

SEQ ID NO: 123 - DNA, 24 bp, Artificial Sequence
  Description of Artificial Sequence: Synthetic oligonucleotide
caagcagaagacggcatacgagat

SEQ ID NO: 124 - DNA, 34 bp, Artificial Sequence
  Description of Artificial Sequence: Synthetic oligonucleotide
gtgactggagttcagacgtgtgctcttccgatct

SEQ ID NO: 125 - DNA, 27 bp, Artificial Sequence
  Description of Artificial Sequence: Synthetic probe
tgcatgaggaaaaccatgagcagaaat

SEQ ID NO: 126 - DNA, 19 bp, Artificial Sequence
  Description of Artificial Sequence: Synthetic probe
cggctactcagcccaaccc

SEQ ID NO: 127 - DNA, 25 bp, Artificial Sequence
  Description of Artificial Sequence: Synthetic probe
tctatctcctgcaaccaccactagc

SEQ ID NO: 128 - DNA, 21 bp, Artificial Sequence
  Description of Artificial Sequence: Synthetic probe
tgtagttgcttgggacccagc

SEQ ID NO: 129 - DNA, 19 bp, Artificial Sequence
  Description of Artificial Sequence: Synthetic probe
ccgacagcaggacctctgg

SEQ ID NO: 130 - DNA, 21 bp, Artificial Sequence
  Description of Artificial Sequence: Synthetic probe
gtcggccaccgttgaatgatg

SEQ ID NO: 131 - DNA, 21 bp, Artificial Sequence
  Description of Artificial Sequence: Synthetic probe
taatgccagcagacgccttgc

SEQ ID NO: 132 - DNA, 20 bp, Artificial Sequence
  Description of Artificial Sequence: Synthetic probe
cggcgcgagaccctctcttc

SEQ ID NO: 133 - DNA, 20 bp, Artificial Sequence
  Description of Artificial Sequence: Synthetic probe
ccacgccctgtgactccatg

SEQ ID NO: 134 - DNA, 27 bp, Artificial Sequence
  Description of Artificial Sequence: Synthetic probe
gaggcagaaaaaaaccctcctgtagtc

SEQ ID NO: 135 - DNA, 24 bp, Artificial Sequence
  Description of Artificial Sequence: Synthetic probe
actcgtgagaacaggctgaggaag

SEQ ID NO: 136 - DNA, 20 bp, Artificial Sequence
  Description of Artificial Sequence: Synthetic probe
cagtcccacatggctgccct

SEQ ID NO: 137 - DNA, 19 bp, Artificial Sequence
  Description of Artificial Sequence: Synthetic probe
agcctctggcagggaaggg

SEQ ID NO: 138 - DNA, 20 bp, Artificial Sequence
  Description of Artificial Sequence: Synthetic probe
gctgatgtctcggccctctt

SEQ ID NO: 139 - DNA, 23 bp, Artificial Sequence
  Description of Artificial Sequence: Synthetic probe
ctttgaagacctcatcagcagct

SEQ ID NO: 140 - DNA, 18 bp, Artificial Sequence
  Description of Artificial Sequence: Synthetic probe
acggcttggcggactgtg

SEQ ID NO: 141 - DNA, 20 bp, Artificial Sequence
  Description of Artificial Sequence: Synthetic probe
cgacgggcctgacacctgac

SEQ ID NO: 142 - DNA, 22 bp, Artificial Sequence
  Description of Artificial Sequence: Synthetic probe
ctgagctgtctacacccacaga

SEQ ID NO: 143 - DNA, 19 bp, Artificial Sequence
  Description of Artificial Sequence: Synthetic probe
gtcccgtctgcccacctct

SEQ ID NO: 144 - DNA, 22 bp, Artificial Sequence
  Description of Artificial Sequence: Synthetic probe
ggtaccgacactgtggccttgt

SEQ ID NO: 145 - DNA, 24 bp, Artificial Sequence
  Description of Artificial Sequence: Synthetic probe
ggtcatgtacgagatgatgtgcgg

SEQ ID NO: 146 - DNA, 19 bp, Artificial Sequence
  Description of Artificial Sequence: Synthetic probe
tggcggcactgacctgagg

SEQ ID NO: 147 - DNA, 21 bp, Artificial Sequence
  Description of Artificial Sequence: Synthetic probe
ttgatgccgagtcctgcccat

SEQ ID NO: 148 - DNA, 19 bp, Artificial Sequence
  Description of Artificial Sequence: Synthetic probe
ccacggctgtgcctcaggt

SEQ ID NO: 149 - DNA, 26 bp, Artificial Sequence
  Description of Artificial Sequence: Synthetic probe
caaggacgggcacattaagatcacag

SEQ ID NO: 150 - DNA, 19 bp, Artificial Sequence
  Description of Artificial Sequence: Synthetic probe
ccacggctgtgcctcaggt

SEQ ID NO: 151 - DNA, 20 bp, Artificial Sequence
  Description of Artificial Sequence: Synthetic probe
atcaagcagcgtggtgtcgg

SEQ ID NO: 152 - DNA, 21 bp, Artificial Sequence
  Description of Artificial Sequence: Synthetic probe
tcacccagccctgctttacag

SEQ ID NO: 153 - DNA, 19 bp, Artificial Sequence
  Description of Artificial Sequence: Synthetic probe
ccgcttgctgaccctggtg

SEQ ID NO: 154 - DNA, 19 bp, Artificial Sequence
  Description of Artificial Sequence: Synthetic probe
gcctcacctgacctcctgc

SEQ ID NO: 155 - DNA, 19 bp, Artificial Sequence
  Description of Artificial Sequence: Synthetic probe
gcacgcagacagaggctct

SEQ ID NO: 156 - DNA, 20 bp, Artificial Sequence
  Description of Artificial Sequence: Synthetic probe
caccacccgcacgtctgtag

SEQ ID NO: 157 - DNA, 20 bp, Artificial Sequence
  Description of Artificial Sequence: Synthetic probe
cctgagaggagcgcgtgagc

SEQ ID NO: 158 - DNA, 22 bp, Artificial Sequence
  Description of Artificial Sequence: Synthetic probe
gctggagggaagctgtactgtc

SEQ ID NO: 159 - DNA, 28 bp, Artificial Sequence
  Description of Artificial Sequence: Synthetic probe
agatccaacattttttgtctctgattca

SEQ ID NO: 160 - DNA, 24 bp, Artificial Sequence
  Description of Artificial Sequence: Synthetic probe
ttcgcaccctcaacgtattcgttg

SEQ ID NO: 161 - DNA, 24 bp, Artificial Sequence
  Description of Artificial Sequence: Synthetic probe
tgaatgtgggtgggtgtgtctata

SEQ ID NO: 162 - DNA, 27 bp, Artificial Sequence
  Description of Artificial Sequence: Synthetic probe
atgcttaatgccatctccagatcctag

SEQ ID NO: 163 - DNA, 27 bp, Artificial Sequence
  Description of Artificial Sequence: Synthetic probe
ttggagataaaatcctagtgatggccg

SEQ ID NO: 164 - DNA, 20 bp, Artificial Sequence
  Description of Artificial Sequence: Synthetic probe
cagtggcccgcttctgtctc

SEQ ID NO: 165 - DNA, 30 bp, Artificial Sequence
  Description of Artificial Sequence: Synthetic probe
gactcagctcagttaattttggttacatcc

SEQ ID NO: 166 - DNA, 21 bp, Artificial Sequence
  Description of Artificial Sequence: Synthetic probe
ctgcagttctcagctcacagc

SEQ ID NO: 167 - DNA, 25 bp, Artificial Sequence
  Description of Artificial Sequence: Synthetic probe
tgtttgactctgtctcctcttgtct

SEQ ID NO: 168 - DNA, 20 bp, Artificial Sequence
  Description of Artificial Sequence: Synthetic probe
tagtgcttcaagggccaggc

SEQ ID NO: 169 - DNA, 24 bp, Artificial Sequence
  Description of Artificial Sequence: Synthetic probe
aactcaaaggagacctggtgtggt

SEQ ID NO: 170 - DNA, 22 bp, Artificial Sequence
  Description of Artificial Sequence: Synthetic probe
ctgaccctccctccttgtcact

SEQ ID NO: 171 - DNA, 25 bp, Artificial Sequence
  Description of Artificial Sequence: Synthetic probe
tgttaaactctgctctggtttgcta

SEQ ID NO: 172 - DNA, 24 bp, Artificial Sequence
  Description of Artificial Sequence: Synthetic probe
tcacgcaggttccctatctcttcc

SEQ ID NO: 173 - DNA, 23 bp, Artificial Sequence
  Description of Artificial Sequence: Synthetic probe
cacagctcggtttctcaatgtct

SEQ ID NO: 174 - DNA, 25 bp, Artificial Sequence
  Description of Artificial Sequence: Synthetic probe
ggccacaaacctaacgtgctttttg

SEQ ID NO: 175 - DNA, 22 bp, Artificial Sequence
  Description of Artificial Sequence: Synthetic probe
cttcataccacagcgggagcca

SEQ ID NO: 176 - DNA, 24 bp, Artificial Sequence
  Description of Artificial Sequence: Synthetic probe
tgagtgactgcctctcctcttgtg

SEQ ID NO: 177 - DNA, 26 bp, Artificial Sequence
  Description of Artificial Sequence: Synthetic probe
agaatacagcacccaaatcaagaaac

SEQ ID NO: 178 - DNA, 26 bp, Artificial Sequence
  Description of Artificial Sequence: Synthetic probe
cctcacacacattcctcttgatgtgt

SEQ ID NO: 179 - DNA, 24 bp, Artificial Sequence
  Description of Artificial Sequence: Synthetic probe
accttgtcctctgactcttctcgc

SEQ ID NO: 180 - DNA, 25 bp, Artificial Sequence
  Description of Artificial Sequence: Synthetic probe
cgtgcttgtgattcttttcctctct

SEQ ID NO: 181 - DNA, 28 bp, Artificial Sequence
  Description of Artificial Sequence: Synthetic probe
ttgcctttagtggtcctgaaaatgatgg

SEQ ID NO: 182 - DNA, 21 bp, Artificial Sequence
  Description of Artificial Sequence: Synthetic probe
tgtgtctgtgtgctctccagg

SEQ ID NO: 183 - DNA, 30 bp, Artificial Sequence
  Description of Artificial Sequence: Synthetic probe
tcatatctgtttctctatgcttttctcctc

SEQ ID NO: 184 - DNA, 24 bp, Artificial Sequence
  Description of Artificial Sequence: Synthetic probe
gcagattcgttttccctgtctctt

SEQ ID NO: 185 - DNA, 28 bp, Artificial Sequence
  Description of Artificial Sequence: Synthetic probe
tggttttttccattgacccttggctatt

SEQ ID NO: 186 - DNA, 33 bp, Artificial Sequence
  Description of Artificial Sequence: Synthetic probe
caagcacatggatcagtgttttctttattttta

SEQ ID NO: 187 - DNA, 20 bp, Artificial Sequence
  Description of Artificial Sequence: Synthetic probe
ggcgaggaggcgatcttgga

SEQ ID NO: 188 - DNA, 22 bp, Artificial Sequence
  Description of Artificial Sequence: Synthetic probe
agagcagtgtaaacggcctcct

SEQ ID NO: 189 - DNA, 33 bp, Artificial Sequence
  Description of Artificial Sequence: Synthetic probe
aagtttacaagagggaatactgaataaaaatgg

SEQ ID NO: 190 - DNA, 26 bp, Artificial Sequence
  Description of Artificial Sequence: Synthetic probe
acacacctaaagatgacaatttgagc

SEQ ID NO: 191 - DNA, 34 bp, Artificial Sequence
  Description of Artificial Sequence: Synthetic probe
gttttactccagggaaattactgctatctaagtt

SEQ ID NO: 192 - DNA, 33 bp, Artificial Sequence
  Description of Artificial Sequence: Synthetic probe
tacaaaataacaataaactggagtacacaaggc

SEQ ID NO: 193 - DNA, 31 bp, Artificial Sequence
  Description of Artificial Sequence: Synthetic probe
agtttcaaataagttgtactgccaagttact

SEQ ID NO: 194 - DNA, 31 bp, Artificial Sequence
  Description of Artificial Sequence: Synthetic probe
ttcattttattcctaatagctcttcgctgtt

SEQ ID NO: 195 - DNA, 33 bp, Artificial Sequence
  Description of Artificial Sequence: Synthetic probe
ctcagaataactacctatttttatacccacaaa

SEQ ID NO: 196 - DNA, 30 bp, Artificial Sequence
  Description of Artificial Sequence: Synthetic probe
accatcttgcttcatacttttctgatattt

SEQ ID NO: 197 - DNA, 27 bp, Artificial Sequence
  Description of Artificial Sequence: Synthetic probe
cttagcaaagtagtcatggcattagtg

SEQ ID NO: 198 - DNA, 24 bp, Artificial Sequence
  Description of Artificial Sequence: Synthetic probe
gccatgtaaaagctggatgaggag

SEQ ID NO: 199 - DNA, 25 bp, Artificial Sequence
  Description of Artificial Sequence: Synthetic probe
ttgctttgaaacatgcactacgatg

SEQ ID NO: 200 - DNA, 32 bp, Artificial Sequence
  Description of Artificial Sequence: Synthetic probe
tccaccagtaattgtctatgtcattaaaaaac

SEQ ID NO: 201 - DNA, 33 bp, Artificial Sequence
  Description of Artificial Sequence: Synthetic probe
tgaaagtaaattaactcatacctgagctatctt

SEQ ID NO: 202 - DNA, 33 bp, Artificial Sequence
  Description of Artificial Sequence: Synthetic probe
tgcctcaaagaaaaagagaaaaaagaaaaacag

SEQ ID NO: 203 - DNA, 27 bp, Artificial Sequence
  Description of Artificial Sequence: Synthetic probe
ggcagcaaaaaaaagccaaacatgaaa

SEQ ID NO: 204 - DNA, 28 bp, Artificial Sequence
  Description of Artificial Sequence: Synthetic probe
gctgacaaattccataaggcactcaata

SEQ ID NO: 205 - DNA, 35 bp, Artificial Sequence
  Description of Artificial Sequence: Synthetic probe
cattgcttacaattaggtctttttgagagtatgaa

SEQ ID NO: 206 - DNA, 28 bp, Artificial Sequence
  Description of Artificial Sequence: Synthetic probe
ggcctatttgccatgagattccttaaag

SEQ ID NO: 207 - DNA, 26 bp, Artificial Sequence
  Description of Artificial Sequence: Synthetic probe
gcagcagagcttcttctaagtgcatt

SEQ ID NO: 208 - DNA, 26 bp, Artificial Sequence
  Description of Artificial Sequence: Synthetic probe
tcgatttgtttctgaaccattggctc

SEQ ID NO: 209 - DNA, 22 bp, Artificial Sequence
  Description of Artificial Sequence: Synthetic probe
ttcgctcacaggatcttcagct

SEQ ID NO: 210 - DNA, 21 bp, Artificial Sequence
  Description of Artificial Sequence: Synthetic probe
ctcatcgaggctcagagcact

SEQ ID NO: 211 - DNA, 32 bp, Artificial Sequence
  Description of Artificial Sequence: Synthetic probe
tctgtaggaatggtatctcgtttttcaaattc

SEQ ID NO: 212 - DNA, 33 bp, Artificial Sequence
  Description of Artificial Sequence: Synthetic probe
ccttattttcttttgcctttcttaattcagcct

SEQ ID NO: 213 - DNA, 30 bp, Artificial Sequence
  Description of Artificial Sequence: Synthetic probe
ttctgaatctggtctctgtatatctttcaa

SEQ ID NO: 214 - DNA, 21 bp, Artificial Sequence
  Description of Artificial Sequence: Synthetic probe
cctctaggagaagtggtggct

SEQ ID NO: 215 - DNA, 29 bp, Artificial Sequence
  Description of Artificial Sequence: Synthetic probe
tgatggagaaagagattcaaatgaagcag

SEQ ID NO: 216 - DNA, 27 bp, Artificial Sequence
  Description of Artificial Sequence: Synthetic probe
attgttaatgggacagtcctcaattct

SEQ ID NO: 217 - DNA, 33 bp, Artificial Sequence
  Description of Artificial Sequence: Synthetic probe
catagaattttcttagtttcattcttcctctct

SEQ ID NO: 218 - DNA, 29 bp, Artificial Sequence
  Description of Artificial Sequence: Synthetic probe
gtaatttactacctttcgttctgtagctc

SEQ ID NO: 219 - DNA, 33 bp, Artificial Sequence
  Description of Artificial Sequence: Synthetic probe
gacttacacacaaaagtaatatcacaacagaaa

SEQ ID NO: 220 - DNA, 27 bp, Artificial Sequence
  Description of Artificial Sequence: Synthetic probe
gcgacagtaatctgttaagccatttat

SEQ ID NO: 221 - DNA, 29 bp, Artificial Sequence
  Description of Artificial Sequence: Synthetic probe
gtgctttctttggtgaagtttcatttcat

SEQ ID NO: 222 - DNA, 27 bp, Artificial Sequence
  Description of Artificial Sequence: Synthetic probe
agcctgaagtacacagagaacaattct

SEQ ID NO: 223 - DNA, 30 bp, Artificial Sequence
  Description of Artificial Sequence: Synthetic probe
tttagttactgagtctaaaacatggtcttg

SEQ ID NO: 224 - DNA, 33 bp, Artificial Sequence
  Description of Artificial Sequence: Synthetic probe
gaagaagcaaattcaaaacagtaaacatttcct

SEQ ID NO: 225 - DNA, 35 bp, Artificial Sequence
  Description of Artificial Sequence: Synthetic probe
aaatttctaaatgtgacatgacctacttactgtac

SEQ ID NO: 226 - DNA, 35 bp, Artificial Sequence
  Description of Artificial Sequence: Synthetic probe
aaatgacactgaatgagaaaatggtaacactttac

SEQ ID NO: 227 - DNA, 33 bp, Artificial Sequence
  Description of Artificial Sequence: Synthetic probe
cagttaggtaaacttgcaggatactttgatatt

SEQ ID NO: 228 - DNA, 28 bp, Artificial Sequence
  Description of Artificial Sequence: Synthetic probe
tgtctgtgtgtgtttatctgtaagtcag

SEQ ID NO: 229 - DNA, 30 bp, Artificial Sequence
  Description of Artificial Sequence: Synthetic probe
ataagtggagagagcctgataaaacaaaca

SEQ ID NO: 230 - DNA, 33 bp, Artificial Sequence
  Description of Artificial Sequence: Synthetic probe
agctactacccagctaaaattatcatctttgta

SEQ ID NO: 231 - DNA, 30 bp, Artificial Sequence
  Description of Artificial Sequence: Synthetic probe
gtcaaaagttgtctgaagaaatagttcttc

SEQ ID NO: 232 - DNA, 33 bp, Artificial Sequence
  Description of Artificial Sequence: Synthetic probe
tttctccttcctaacagtttaccaaagttgaat

SEQ ID NO: 233 - DNA, 34 bp, Artificial Sequence
  Description of Artificial Sequence: Synthetic probe
ccggacaagagtttctgaatttgtaatcttaaag

SEQ ID NO: 234 - DNA, 32 bp, Artificial Sequence
  Description of Artificial Sequence: Synthetic probe
gtcttccaaacaaatgtaataattttcacagg

SEQ ID NO: 235 - DNA, 34 bp, Artificial Sequence
  Description of Artificial Sequence: Synthetic probe
tgacagagaaagatcctatctcaaaaaacaaaac

SEQ ID NO: 236 - DNA, 30 bp, Artificial Sequence
  Description of Artificial Sequence: Synthetic probe
caaaatatgatagcaaaacaggaagcatac

SEQ ID NO: 237 - DNA, 30 bp, Artificial Sequence
  Description of Artificial Sequence: Synthetic probe
aggcctcttatactgccaaatcaatataaa

SEQ ID NO: 238 - DNA, 27 bp, Artificial Sequence
  Description of Artificial Sequence: Synthetic probe
agtcagcaacatcagataaaatccaag

SEQ ID NO: 239 - DNA, 34 bp, Artificial Sequence
  Description of Artificial Sequence: Synthetic probe
aatttcttacgatagtggtttcagaagttcaaga

SEQ ID NO: 240 - DNA, 33 bp, Artificial Sequence
  Description of Artificial Sequence: Synthetic probe
tagcaaaagaaaaataggaccacaaaatagact

SEQ ID NO: 241 - DNA, 24 bp, Artificial Sequence
  Description of Artificial Sequence: Synthetic probe
tgcaaaaactcacctcaagcaaag

SEQ ID NO: 242 - DNA, 31 bp, Artificial Sequence
  Description of Artificial Sequence: Synthetic probe
ttactatgtaagacattctactgccatctgc

SEQ ID NO: 243 - DNA, 33 bp, Artificial Sequence
  Description of Artificial Sequence: Synthetic probe
ttggtgaagtaatttatgggatattcatagcaa

SEQ ID NO: 244 - DNA, 28 bp, Artificial Sequence
  Description of Artificial Sequence: Synthetic probe
aattatttcacagtgacctaaggaagct

SEQ ID NO: 245 - DNA, 24 bp, Artificial Sequence
  Description of Artificial Sequence: Synthetic probe
atggtatgtgtgttgctggtgagg

SEQ ID NO: 246 - DNA, 31 bp, Artificial Sequence
  Description of Artificial Sequence: Synthetic probe
acttcacctcatcaaaatgacttctaatcac

SEQ ID NO: 247 - DNA, 35 bp, Artificial Sequence
  Description of Artificial Sequence: Synthetic probe
aggttatatctcatatcattcagggaatgaaaagt

SEQ ID NO: 248 - DNA, 33 bp, Artificial Sequence
  Description of Artificial Sequence: Synthetic probe
aaaacttgtgaagttagagctagttctctaagt

SEQ ID NO: 249 - DNA, 29 bp, Artificial Sequence
  Description of Artificial Sequence: Synthetic probe
ttacagggcttttggaaagaatttctaaa

SEQ ID NO: 250 - DNA, 34 bp, Artificial Sequence
  Description of Artificial Sequence: Synthetic probe
gcaagaagaattttctgataggaatcctagaaaa

SEQ ID NO: 251 - DNA, 29 bp, Artificial Sequence
  Description of Artificial Sequence: Synthetic probe
gcaagaagaattttctgataggaatccta

SEQ ID NO: 252 - DNA, 30 bp, Artificial Sequence
  Description of Artificial Sequence: Synthetic probe
gcaaaaaaacaggaagaacaggatagaaag

SEQ ID NO: 253 - DNA, 33 bp, Artificial Sequence
  Description of Artificial Sequence: Synthetic probe
aataccattttgaagatgagtcagaaaattacc

SEQ ID NO: 254 - DNA, 35 bp, Artificial Sequence
  Description of Artificial Sequence: Synthetic probe
tctatcactaagtatttcaacaagtccaataccta

SEQ ID NO: 255 - DNA, 33 bp, Artificial Sequence
  Description of Artificial Sequence: Synthetic probe
tactgctagagcattacagatttttgaaaagta

SEQ ID NO: 256 - DNA, 25 bp, Artificial Sequence
  Description of Artificial Sequence: Synthetic probe
agaaacaggtagaaatagcccatgt

SEQ ID NO: 257 - DNA, 25 bp, Artificial Sequence
  Description of Artificial Sequence: Synthetic probe
tatgtgatccgcagttgactgaaat

SEQ ID NO: 258 - DNA, 31 bp, Artificial Sequence
  Description of Artificial Sequence: Synthetic probe
cattctccatgaatgtcatattgagattaca

SEQ ID NO: 259 - DNA, 31 bp, Artificial Sequence
  Description of Artificial Sequence: Synthetic probe
caaacagaactgttttagatatgctgggtat

SEQ ID NO: 260 - DNA, 33 bp, Artificial Sequence
  Description of Artificial Sequence: Synthetic probe
tatcacagcactctttagataaacaggtcataa

SEQ ID NO: 261 - DNA, 32 bp, Artificial Sequence
  Description of Artificial Sequence: Synthetic probe
tttagtgggattccatcttaaatccatctttc

SEQ ID NO: 262 - DNA, 27 bp, Artificial Sequence
  Description of Artificial Sequence: Synthetic probe
tagatcctaaacgtaagaagcaacact

SEQ ID NO: 263 - DNA, 32 bp, Artificial Sequence
  Description of Artificial Sequence: Synthetic probe
atatacccttattgagacaatgccaacattaa

SEQ ID NO: 264 - DNA, 35 bp, Artificial Sequence
  Description of Artificial Sequence: Synthetic probe
cagtgtctataacaaaataacccaaagtatgagat

SEQ ID NO: 265 - DNA, 31 bp, Artificial Sequence
  Description of Artificial Sequence: Synthetic probe
tttacctagtaatgggttgtaacatcttccc

SEQ ID NO: 266 - DNA, 30 bp, Artificial Sequence
  Description of Artificial Sequence: Synthetic probe
tggctttaccaaatctgggaaaaaatgtac

SEQ ID NO: 267 - DNA, 28 bp, Artificial Sequence
  Description of Artificial Sequence: Synthetic probe
tgtttagaatgaggagagaggcaaaaaa

SEQ ID NO: 268 - DNA, 33 bp, Artificial Sequence
  Description of Artificial Sequence: Synthetic probe
ctcaagttttcagaaaagaagccatgacattaa

SEQ ID NO: 269 - DNA, 27 bp, Artificial Sequence
  Description of Artificial Sequence: Synthetic probe
ggtaacagaaaagctgcactttaggat

SEQ ID NO: 270 - DNA, 29 bp, Artificial Sequence
  Description of Artificial Sequence: Synthetic probe
aggaaagtcaagaggtaagatgacatagt

SEQ ID NO: 271 - DNA, 28 bp, Artificial Sequence
  Description of Artificial Sequence: Synthetic probe
aaataacagtaaaacactaatccagcca

SEQ ID NO: 272 - DNA, 32 bp, Artificial Sequence
  Description of Artificial Sequence: Synthetic probe
atcttgatgaaaagatgaagcatattcatgct

SEQ ID NO: 273 - DNA, 29 bp, Artificial Sequence
  Description of Artificial Sequence: Synthetic probe
tcataatttccagcaacttctactgcctt

SEQ ID NO: 274 - DNA, 32 bp, Artificial Sequence
  Description of Artificial Sequence: Synthetic probe
gaacataaaattgtcacttgtagaaacctagt

SEQ ID NO: 275 - DNA, 28 bp, Artificial Sequence
  Description of Artificial Sequence: Synthetic probe
cttatgtctaagtttttcaagcacaggg

SEQ ID NO: 276 - DNA, 30 bp, Artificial Sequence
  Description of Artificial Sequence: Synthetic probe
attgtggtttgattttcaggtttacttaca

SEQ ID NO: 277 - DNA, 28 bp, Artificial Sequence
  Description of Artificial Sequence: Synthetic probe
tagtcagaaattcatctctgtttgcatt

SEQ ID NO: 278 - DNA, 32 bp, Artificial Sequence
  Description of Artificial Sequence: Synthetic probe
ttctaggaaagactgaatatcacacttctaaa

SEQ ID NO: 279 - DNA, 31 bp, Artificial Sequence
  Description of Artificial Sequence: Synthetic probe
tctacagagagtaacacagcaagaaagtaac

SEQ ID NO: 280 - DNA, 33 bp, Artificial Sequence
  Description of Artificial Sequence: Synthetic probe
ggcaaaggaaatataatactgagaaattatagg

SEQ ID NO: 281 - DNA, 29 bp, Artificial Sequence
  Description of Artificial Sequence: Synthetic probe
catcactaaaactctaagggctaagccag

SEQ ID NO: 282 - DNA, 28 bp, Artificial Sequence
  Description of Artificial Sequence: Synthetic probe
atgtttttggtgaactaacagaagtaca

SEQ ID NO: 283 - DNA, 33 bp, Artificial Sequence
  Description of Artificial Sequence: Synthetic probe
ttacaataacctttaattttgggtgtcactcac

SEQ ID NO: 284 - DNA, 30 bp, Artificial Sequence
  Description of Artificial Sequence: Synthetic probe
gccaaacaacaaagtgctcaatctactata

SEQ ID NO: 285 - DNA, 30 bp, Artificial Sequence
  Description of Artificial Sequence: Synthetic probe
ggcaaacaacattccatgatgaccaaatat

SEQ ID NO: 286 - DNA, 26 bp, Artificial Sequence
  Description of Artificial Sequence: Synthetic probe
cccagcccatgtaattttgacatcaa

SEQ ID NO: 287 - DNA, 34 bp, Artificial Sequence
  Description of Artificial Sequence: Synthetic probe
agtctacctggtaagaaaaaaaataaagtcttcc

SEQ ID NO: 288 - DNA, 27 bp, Artificial Sequence
  Description of Artificial Sequence: Synthetic probe
cattcttggtcatctgcattcagagta

SEQ ID NO: 289 - DNA, 31 bp, Artificial Sequence
  Description of Artificial Sequence: Synthetic probe
atttctaaaggctgaatgaaagggtaattca

SEQ ID NO: 290 - DNA, 28 bp, Artificial Sequence
  Description of Artificial Sequence: Synthetic probe
aattcacattccctgactttgtaacaga

SEQ ID NO: 291 - DNA, 27 bp, Artificial Sequence
  Description of Artificial Sequence: Synthetic probe
tgatcataaaacgagaagcacatcaac

SEQ ID NO: 292 - DNA, 29 bp, Artificial Sequence
  Description of Artificial Sequence: Synthetic probe
tgtgttcctttcggaagagatgtctaata

SEQ ID NO: 293 - DNA, 30 bp, Artificial Sequence
  Description of Artificial Sequence: Synthetic probe
ccaagtgttagaatgtttatcctttgttgc

SEQ ID NO: 294 - DNA, 33 bp, Artificial Sequence
  Description of Artificial Sequence: Synthetic probe
cttcacattctaaagtgttcaaattcctcctag

SEQ ID NO: 295 - DNA, 29 bp, Artificial Sequence
  Description of Artificial Sequence: Synthetic probe
tcacctctattcacagcttagcttatcct

SEQ ID NO: 296 - DNA, 21 bp, Artificial Sequence
  Description of Artificial Sequence: Synthetic probe
tcatcctgtctccaggccact

SEQ ID NO: 297 - DNA, 29 bp, Artificial Sequence
  Description of Artificial Sequence: Synthetic probe
gccagaaagtttattttctcttccattct

SEQ ID NO: 298 - DNA, 29 bp, Artificial Sequence
  Description of Artificial Sequence: Synthetic probe
tggctttgttcaaattaaaggttcttctt

SEQ ID NO: 299 - DNA, 25 bp, Artificial Sequence
  Description of Artificial Sequence: Synthetic probe
cagggtgaaactaatgcagcccttc

SEQ ID NO: 300 - DNA, 25 bp, Artificial Sequence
  Description of Artificial Sequence: Synthetic probe
agcagggaaaggagagttcctatgt

SEQ ID NO: 301 - DNA, 26 bp, Artificial Sequence
  Description of Artificial Sequence: Synthetic probe
ggagttggcagatgctctaatgtact

SEQ ID NO: 302 - DNA, 23 bp, Artificial Sequence
  Description of Artificial Sequence: Synthetic probe
ccagctcttttatgcctttggcc

SEQ ID NO: 303 - DNA, 19 bp, Artificial Sequence
  Description of Artificial Sequence: Synthetic probe
cgagcagcgaacagccacg

SEQ ID NO: 304 - DNA, 25 bp, Artificial Sequence
  Description of Artificial Sequence: Synthetic probe
ggctcgggagaagaaaagccatttc

SEQ ID NO: 305 - DNA, 21 bp, Artificial Sequence
  Description of Artificial Sequence: Synthetic probe
aaggcaccctcagagctaccc

SEQ ID NO: 306 - DNA, 24 bp, Artificial Sequence
  Description of Artificial Sequence: Synthetic probe
atgagaaggtcatccctgttcgca

SEQ ID NO: 307 - DNA, 21 bp, Artificial Sequence
  Description of Artificial Sequence: Synthetic probe
aaggcaccctcagagctaccc

SEQ ID NO: 308 - DNA, 24 bp, Artificial Sequence
  Description of Artificial Sequence: Synthetic probe
cttctcacggctgtttcccttctc

SEQ ID NO: 309 - DNA, 20 bp, Artificial Sequence
  Description of Artificial Sequence: Synthetic probe
cccacacctgccatcatccc

SEQ ID NO: 310 - DNA, 21 bp, Artificial Sequence
  Description of Artificial Sequence: Synthetic probe
cctgagctggctgaccactat

SEQ ID NO: 311 - DNA, 22 bp, Artificial Sequence
  Description of Artificial Sequence: Synthetic probe
cacaacctatgagcgccacatg

SEQ ID NO: 312 - DNA, 20 bp, Artificial Sequence
  Description of Artificial Sequence: Synthetic probe
tcggagctgacccacatccc

SEQ ID NO: 313 - DNA, 21 bp, Artificial Sequence
  Description of Artificial Sequence: Synthetic probe
tctgtcacctgtgatggtggc

SEQ ID NO: 314 - DNA, 22 bp, Artificial Sequence
  Description of Artificial Sequence: Synthetic probe
tgtggatgtgggtggaaggagg

SEQ ID NO: 315 - DNA, 24 bp, Artificial Sequence
  Description of Artificial Sequence: Synthetic probe
actgatataagcaaggtccggtgg

SEQ ID NO: 316 - DNA, 19 bp, Artificial Sequence
  Description of Artificial Sequence: Synthetic probe
cccaagccactccactcca

SEQ ID NO: 317 - DNA, 22 bp, Artificial Sequence
  Description of Artificial Sequence: Synthetic probe
aagtcagggctgtcagggagag

SEQ ID NO: 318 - DNA, 21 bp, Artificial Sequence
  Description of Artificial Sequence: Synthetic probe
ggtgttgagggtagggaagga

SEQ ID NO: 319 - DNA, 19 bp, Artificial Sequence
  Description of Artificial Sequence: Synthetic probe
catcccaggccacacagcc

SEQ ID NO: 320 - DNA, 27 bp, Artificial Sequence
  Description of Artificial Sequence: Synthetic probe
ccagattctctacagcctttagatcca

SEQ ID NO: 321 - DNA, 21 bp, Artificial Sequence
  Description of Artificial Sequence: Synthetic probe
actcaccctctcccagagtct

SEQ ID NO: 322 - DNA, 20 bp, Artificial Sequence
  Description of Artificial Sequence: Synthetic probe
gggcatagggaaggagctgg

SEQ ID NO: 323 - DNA, 21 bp, Artificial Sequence
  Description of Artificial Sequence: Synthetic probe
agggctcttccctctgctatg

SEQ ID NO: 324 - DNA, 29 bp, Artificial Sequence
  Description of Artificial Sequence: Synthetic probe
atatttgtagactgaatgattaaacgccc

SEQ ID NO: 325 - DNA, 19 bp, Artificial Sequence
  Description of Artificial Sequence: Synthetic probe
tcagggagtgcaggagcag

SEQ ID NO: 326 - DNA, 20 bp, Artificial Sequence
  Description of Artificial Sequence: Synthetic probe
atggtcaggccatgccctcc

SEQ ID NO: 327 - DNA, 21 bp, Artificial Sequence
  Description of Artificial Sequence: Synthetic probe
gggagacctaagggtcctcac

SEQ ID NO: 328 - DNA, 24 bp, Artificial Sequence
  Description of Artificial Sequence: Synthetic probe
aggccttcagtgtgttctccaaat

SEQ ID NO: 329 - DNA, 21 bp, Artificial Sequence
  Description of Artificial Sequence: Synthetic probe
gagtaccaggtggagggttgt

SEQ ID NO: 330 - DNA, 33 bp, Artificial Sequence
  Description of Artificial Sequence: Synthetic probe
ctgctctctctctaatactctttctttttcttc

SEQ ID NO: 331 - DNA, 18 bp, Artificial Sequence
  Description of Artificial Sequence: Synthetic probe
gacgctttgccacggtgg

SEQ ID NO: 332 - DNA, 22 bp, Artificial Sequence
  Description of Artificial Sequence: Synthetic probe
cccgttgcttttcctctgggaa

SEQ ID NO: 333 - DNA, 32 bp, Artificial Sequence
  Description of Artificial Sequence: Synthetic probe
cacccagattttcattcttctttctgtttttt

SEQ ID NO: 334 - DNA, 31 bp, Artificial Sequence
  Description of Artificial Sequence: Synthetic probe
gttgaattatttcccttttttttctctctcc

SEQ ID NO: 335 - DNA, 34 bp, Artificial Sequence
  Description of Artificial Sequence: Synthetic probe
gctctaggaattatagtaggttgtttttcagtct

SEQ ID NO: 336 - DNA, 30 bp, Artificial Sequence
  Description of Artificial Sequence: Synthetic probe
tctactgttttcctttacttactacacctc

SEQ ID NO: 337 - DNA, 31 bp, Artificial Sequence
  Description of Artificial Sequence: Synthetic probe
cctttagccctactcaggttaaaatgatgtt

SEQ ID NO: 338 - DNA, 30 bp, Artificial Sequence
  Description of Artificial Sequence: Synthetic probe
tcttttgtaagaattgctaaagtttgtcga

SEQ ID NO: 339 - DNA, 30 bp, Artificial Sequence
  Description of Artificial Sequence: Synthetic probe
gtgaaaacacccaagaatgttttatacttt

SEQ ID NO: 340 - DNA, 32 bp, Artificial Sequence
  Description of Artificial Sequence: Synthetic probe
agggtgaaacataaggttttctttttctgttt

SEQ ID NO: 341 - DNA, 29 bp, Artificial Sequence
  Description of Artificial Sequence: Synthetic probe
ccctgataaattaacatacttgctcctcc

SEQ ID NO: 342 - DNA, 35 bp, Artificial Sequence
  Description of Artificial Sequence: Synthetic probe
ctctctgattatatgcttgcttggaataaatatac

SEQ ID NO: 343 - DNA, 34 bp, Artificial Sequence
  Description of Artificial Sequence: Synthetic probe
gttactctgaatcttatcttccaatgacttcatt

SEQ ID NO: 344 - DNA, 28 bp, Artificial Sequence
  Description of Artificial Sequence: Synthetic probe
aagttaggtttgttttgttttgcctcac

SEQ ID NO: 345 - DNA, 29 bp, Artificial Sequence
  Description of Artificial Sequence: Synthetic probe
tttcttgtgagtttttgaaatctctgtga

SEQ ID NO: 346 - DNA, 27 bp, Artificial Sequence
  Description of Artificial Sequence: Synthetic probe
aagaaaggcttgtgtctacatttttca

SEQ ID NO: 347 - DNA, 32 bp, Artificial Sequence
  Description of Artificial Sequence: Synthetic probe
aatgtaatttgctccctttacctcttatcaat

SEQ ID NO: 348 - DNA, 20 bp, Artificial Sequence
  Description of Artificial Sequence: Synthetic probe
cagatgtggcacggagcaac

SEQ ID NO: 349 - DNA, 31 bp, Artificial Sequence
  Description of Artificial Sequence: Synthetic probe
tattctcttttgttaatgtcaggacaaagtc

SEQ ID NO: 350 - DNA, 32 bp, Artificial Sequence
  Description of Artificial Sequence: Synthetic probe
cagttactgtgatgtagttgtctatgttaaaa

SEQ ID NO: 351 - DNA, 20 bp, Artificial Sequence
  Description of Artificial Sequence: Synthetic probe
ccagctctccgcctcccttc

SEQ ID NO: 352 - DNA, 23 bp, Artificial Sequence
  Description of Artificial Sequence: Synthetic probe
ctctgcttgtgttctctgtctcc

SEQ ID NO: 353 - DNA, 30 bp, Artificial Sequence
  Description of Artificial Sequence: Synthetic probe
atgaagtgacagttccagtagtcctacttt

SEQ ID NO: 354 - DNA, 26 bp, Artificial Sequence
  Description of Artificial Sequence: Synthetic probe
gggcctgggttaagtatgcagattac

SEQ ID NO: 355 - DNA, 25 bp, Artificial Sequence
  Description of Artificial Sequence: Synthetic probe
cctgtccctctctcttcctctcttc

SEQ ID NO: 356 - DNA, 26 bp, Artificial Sequence
  Description of Artificial Sequence: Synthetic probe
tctcttatcctgatgggttgtgtttg

SEQ ID NO: 357 - DNA, 26 bp, Artificial Sequence
  Description of Artificial Sequence: Synthetic probe
agcacgttcttctgctgtatgtaacc

SEQ ID NO: 358 - DNA, 32 bp, Artificial Sequence
  Description of Artificial Sequence: Synthetic probe
gcacttcctgattttgttttcaacttctaatc

SEQ ID NO: 359 - DNA, 29 bp, Artificial Sequence
  Description of Artificial Sequence: Synthetic probe
tagtattctgagctgtgtgctagaggtaa

SEQ ID NO: 360 - DNA, 29 bp, Artificial Sequence
  Description of Artificial Sequence: Synthetic probe
tgatactgctgggtataatgcaatggaag

SEQ ID NO: 361 - DNA, 32 bp, Artificial Sequence
  Description of Artificial Sequence: Synthetic probe
ccagaactttgtaattcaacattcatcgttgt

SEQ ID NO: 362 - DNA, 25 bp, Artificial Sequence
  Description of Artificial Sequence: Synthetic probe
aattggtggcgatggttttctcctt

SEQ ID NO: 363 - DNA, 33 bp, Artificial Sequence
  Description of Artificial Sequence: Synthetic probe
tgaattatcactatcagaacaaagcagtaaagt

SEQ ID NO: 364 - DNA, 27 bp, Artificial Sequence
  Description of Artificial Sequence: Synthetic probe
cgttcccttgatgtctacaatttcacc

SEQ ID NO: 365 - DNA, 28 bp, Artificial Sequence
  Description of Artificial Sequence: Synthetic probe
ctcaaagtatttcattttcttggtgcca

SEQ ID NO: 366 - DNA, 26 bp, Artificial Sequence
  Description of Artificial Sequence: Synthetic probe
cacagcaagttgcagcgtttatagtc

SEQ ID NO: 367 - DNA, 28 bp, Artificial Sequence
  Description of Artificial Sequence: Synthetic probe
tttcttcacagtgcagtgaattggaaga

SEQ ID NO: 368 - DNA, 35 bp, Artificial Sequence
  Description of Artificial Sequence: Synthetic probe
atgaagaagtagttcagactgttaatacagatttc

SEQ ID NO: 369 - DNA, 27 bp, Artificial Sequence
  Description of Artificial Sequence: Synthetic probe
ctttcctgtggttggtcagaaagataa

SEQ ID NO: 370 - DNA, 27 bp, Artificial Sequence
  Description of Artificial Sequence: Synthetic probe
agatctcatgttaagtggagaaagggt

SEQ ID NO: 371 - DNA, 30 bp, Artificial Sequence
  Description of Artificial Sequence: Synthetic probe
ttctattcagaatgagaaaaatcctaaccc

SEQ ID NO: 372 - DNA, 26 bp, Artificial Sequence
  Description of Artificial Sequence: Synthetic probe
ccagaagtgatgaactgttaggttct

SEQ ID NO: 373 - DNA, 29 bp, Artificial Sequence
  Description of Artificial Sequence: Synthetic probe
tgacaattcagtttttgagtaccttgtta

SEQ ID NO: 374 - DNA, 32 bp, Artificial Sequence
  Description of Artificial Sequence: Synthetic probe
tgtttcttattaggactctgtcttttccctat

SEQ ID NO: 375 - DNA, 26 bp, Artificial Sequence
  Description of Artificial Sequence: Synthetic probe
ctgccacagtagatgctcagtaaata

SEQ ID NO: 376 - DNA, 27 bp, Artificial Sequence
  Description of Artificial Sequence: Synthetic probe
tgcttgactgttctttaccatactgtt

SEQ ID NO: 377 - DNA, 31 bp, Artificial Sequence
  Description of Artificial Sequence: Synthetic probe
ttttctctaactgcaaacataatgttttccc

SEQ ID NO: 378 - DNA, 28 bp, Artificial Sequence
  Description of Artificial Sequence: Synthetic probe
cacttgctgagtgtgtttctcaaacaat

SEQ ID NO: 379 - DNA, 33 bp, Artificial Sequence
  Description of Artificial Sequence: Synthetic probe
ccttttgagtattctttctacaaaaggaagtaa

SEQ ID NO: 380 - DNA, 28 bp, Artificial Sequence
  Description of Artificial Sequence: Synthetic probe
tgagcctcatttattttctttttctccc

SEQ ID NO: 381 - DNA, 30 bp, Artificial Sequence
  Description of Artificial Sequence: Synthetic probe
tctaatgtgttaaagttcattggaacagaa

SEQ ID NO: 382 - DNA, 29 bp, Artificial Sequence
  Description of Artificial Sequence: Synthetic probe
agcattttttagaaaacactttctcggtg

SEQ ID NO: 383 - DNA, 30 bp, Artificial Sequence
  Description of Artificial Sequence: Synthetic probe
ggtttggttcgtaattgttgtttttatgtt

SEQ ID NO: 384 - DNA, 31 bp, Artificial Sequence
  Description of Artificial Sequence: Synthetic probe
caggtttgcctaaattcctagtttgtagttc

SEQ ID NO: 385 - DNA, 28 bp, Artificial Sequence
  Description of Artificial Sequence: Synthetic probe
atcttctaccaggctcttagccaaaata

SEQ ID NO: 386 - DNA, 32 bp, Artificial Sequence
  Description of Artificial Sequence: Synthetic probe
gtttttaatcatacctgacttatctctttgtg

SEQ ID NO: 387 - DNA, 33 bp, Artificial Sequence
  Description of Artificial Sequence: Synthetic probe
tattagagatgacaattatcaacctcatctgct

SEQ ID NO: 388 - DNA, 31 bp, Artificial Sequence
  Description of Artificial Sequence: Synthetic probe
ggcaaaggtataacgctattgtcaaattctc

SEQ ID NO: 389 - DNA, 33 bp, Artificial Sequence; identical to SEQ ID NO: 387
  Description of Artificial Sequence: Synthetic probe

SEQ ID NO: 390 - DNA, 29 bp, Artificial Sequence
  Description of Artificial Sequence: Synthetic probe
taacaaggcattccaaaattgttagcaat

SEQ ID NO: 391 - DNA, 28 bp, Artificial Sequence
  Description of Artificial Sequence: Synthetic probe
tgtagttcaactaaacagaggacttacc

SEQ ID NO: 392 - DNA, 32 bp, Artificial Sequence
  Description of Artificial Sequence: Synthetic probe
tttcctagtcttgctagttcttactttttgta

SEQ ID NO: 393 - DNA, 28 bp, Artificial Sequence
  Description of Artificial Sequence: Synthetic probe
agaagccactggagaagttccagatatt

SEQ ID NO: 394 - DNA, 30 bp, Artificial Sequence
  Description of Artificial Sequence: Synthetic probe
cacagaaggaatcgtcatctataaaactat

SEQ ID NO: 395 - DNA, 26 bp, Artificial Sequence
  Description of Artificial Sequence: Synthetic probe
atcattttcacactgtccttcctgca

SEQ ID NO: 396 - DNA, 28 bp, Artificial Sequence
  Description of Artificial Sequence: Synthetic probe
cttgaaaatgggttcgtttacacaagtc

SEQ ID NO: 397 - DNA, 33 bp, Artificial Sequence
  Description of Artificial Sequence: Synthetic probe
aactgagtaaattcaaactgacttcctgattct

SEQ ID NO: 398 - DNA, 26 bp, Artificial Sequence
  Description of Artificial Sequence: Synthetic probe
tcttcaacaaaagtgccagtagtcat

SEQ ID NO: 399 - DNA, 19 bp, Artificial Sequence
  Description of Artificial Sequence: Synthetic probe
cgttcgggttgtccctgga

SEQ ID NO: 400 - DNA, 28 bp, Artificial Sequence
  Description of Artificial Sequence: Synthetic probe
tccttctctaagccatttttttgcttca

SEQ ID NO: 401 - DNA, 26 bp, Artificial Sequence
  Description of Artificial Sequence: Synthetic probe
gcctcgtaacaacctgccataatttt

SEQ ID NO: 402 - DNA, 27 bp, Artificial Sequence
  Description of Artificial Sequence: Synthetic probe
agacgtaggtgaatagtgaagactatg

SEQ ID NO: 403 - DNA, 29 bp, Artificial Sequence
  Description of Artificial Sequence: Synthetic probe
gattggcaacacgaaaggtaaaaatgaac

SEQ ID NO: 404 - DNA, 33 bp, Artificial Sequence
  Description of Artificial Sequence: Synthetic probe
ctatagagggagaacagatataaataaaaagct

SEQ ID NO: 405 - DNA, 33 bp, Artificial Sequence
  Description of Artificial Sequence: Synthetic probe
cgagacttttctcatactgtattagaatttaga

SEQ ID NO: 406 - DNA, 27 bp, Artificial Sequence
  Description of Artificial Sequence: Synthetic probe
aatggatgtcctgaaactgctaaattg

SEQ ID NO: 407 - DNA, 31 bp, Artificial Sequence
  Description of Artificial Sequence: Synthetic probe
ttaacaacggaaatatctaactgaaaggcaa

SEQ ID NO: 408 - DNA, 32 bp, Artificial Sequence
  Description of Artificial Sequence: Synthetic probe
aaaagccatcagtattgtagacaaacacatac

SEQ ID NO: 409 - DNA, 33 bp, Artificial Sequence
  Description of Artificial Sequence: Synthetic probe
tacagctacacaaaataaacacacacaaaaaag

SEQ ID NO: 410 - DNA, 31 bp, Artificial Sequence
  Description of Artificial Sequence: Synthetic probe
agagaagaaagagggatgagggaatacataa

SEQ ID NO: 411 - DNA, 33 bp, Artificial Sequence
  Description of Artificial Sequence: Synthetic probe
acacagagccctgaacaaataaaagtagaatat

SEQ ID NO: 412 - DNA, 27 bp, Artificial Sequence
  Description of Artificial Sequence: Synthetic probe
gaaaccttaaccatactgccgtatatg

SEQ ID NO: 413 - DNA, 27 bp, Artificial Sequence
  Description of Artificial Sequence: Synthetic probe
aaacacagagaacaagtgtttttgcag

SEQ ID NO: 414 - DNA, 27 bp, Artificial Sequence
  Description of Artificial Sequence: Synthetic probe
caatgactgatttttaccaagagtgca

SEQ ID NO: 415 - DNA, 26 bp, Artificial Sequence
  Description of Artificial Sequence: Synthetic probe
agtactgttagcagaaatctggacaa

SEQ ID NO: 416 - DNA, 27 bp, Artificial Sequence
  Description of Artificial Sequence: Synthetic probe
cgaaactccatctcaaacaaacaaaca

SEQ ID NO: 417 - DNA, 32 bp, Artificial Sequence
  Description of Artificial Sequence: Synthetic probe
caaagtctctaagactttgttctcatattaga

SEQ ID NO: 418 - DNA, 29 bp, Artificial Sequence
  Description of Artificial Sequence: Synthetic probe
caagcctcattatatgtcctcttactctc

SEQ ID NO: 419 - DNA, 29 bp, Artificial Sequence
  Description of Artificial Sequence: Synthetic probe
gaatagcttacaatacgcaacttccacac

SEQ ID NO: 420 - DNA, 31 bp, Artificial Sequence
  Description of Artificial Sequence: Synthetic probe
ctaactgtatgttagctctttcagatttact

SEQ ID NO: 421 - DNA, 33 bp, Artificial Sequence
  Description of Artificial Sequence: Synthetic probe
aactggtagctccaactaatcataagagatttt

SEQ ID NO: 422 - DNA, 29 bp, Artificial Sequence
  Description of Artificial Sequence: Synthetic probe
aatgtcctcattaaggtctatccaaaact

SEQ ID NO: 423 - DNA, 29 bp, Artificial Sequence
  Description of Artificial Sequence: Synthetic probe
caaaatgtgtggtgatgctgaaaagtaac

SEQ ID NO: 424 - DNA, 33 bp, Artificial Sequence
  Description of Artificial Sequence: Synthetic probe
gtatacaacagaatatacgatggcctccatata

SEQ ID NO: 425 - DNA, 24 bp, Artificial Sequence
  Description of Artificial Sequence: Synthetic probe
ttgaagtcatctgggctgagacag

SEQ ID NO: 426 - DNA, 32 bp, Artificial Sequence
  Description of Artificial Sequence: Synthetic probe
actggaaaggttaagcgtcaataatttattgt

SEQ ID NO: 427 - DNA, 22 bp, Artificial Sequence
  Description of Artificial Sequence: Synthetic probe
ggtctgggcaacaagttgcagg

SEQ ID NO: 428 - DNA, 22 bp, Artificial Sequence
  Description of Artificial Sequence: Synthetic probe
ctcctcctcgcacttctgttcc

SEQ ID NO: 429 - DNA, 19 bp, Artificial Sequence
  Description of Artificial Sequence: Synthetic probe
atatgtcagaggcgggccg

SEQ ID NO: 430 - DNA, 21 bp, Artificial Sequence
  Description of Artificial Sequence: Synthetic probe
gccagggtcacctaaggagcc

SEQ ID NO: 431 - DNA, 20 bp, Artificial Sequence
  Description of Artificial Sequence: Synthetic probe
gcaaggctgcctgggacatc

SEQ ID NO: 432 - DNA, 21 bp, Artificial Sequence
  Description of Artificial Sequence: Synthetic probe
cttcgatctgctcctggcagg

SEQ ID NO: 433 - DNA, 21 bp, Artificial Sequence
  Description of Artificial Sequence: Synthetic probe
cggagaggagggactgtcagg

SEQ ID NO: 434 - DNA, 19 bp, Artificial Sequence
  Description of Artificial Sequence: Synthetic probe
atgcgtccctcgcaagtca

SEQ ID NO: 435 - DNA, 19 bp, Artificial Sequence
  Description of Artificial Sequence: Synthetic probe
tactccgcccagggacacc

SEQ ID NO: 436 - DNA, 24 bp, Artificial Sequence
  Description of Artificial Sequence: Synthetic probe
cgcactaaaacaacagcgaacttc

SEQ ID NO: 437 - DNA, 31 bp, Artificial Sequence
  Description of Artificial Sequence: Synthetic probe
aggtttttaggaaatgggcctttttcatttt

SEQ ID NO: 438 - DNA, 25 bp, Artificial Sequence
  Description of Artificial Sequence: Synthetic probe
aaaaaatcctgggtggatgttaccc

SEQ ID NO: 439 - DNA, 35 bp, Artificial Sequence
  Description of Artificial Sequence: Synthetic probe
taagagtctttctgagtattcagattctcattagt

SEQ ID NO: 440 - DNA, 20 bp, Artificial Sequence
  Description of Artificial Sequence: Synthetic probe
ccctgacctctcggtccagc

SEQ ID NO: 441 - DNA, 30 bp, Artificial Sequence
  Description of Artificial Sequence: Synthetic probe
cctttctttggaaaccctctaaggagttat

SEQ ID NO: 442 - DNA, 22 bp, Artificial Sequence
  Description of Artificial Sequence: Synthetic probe
gtgaggatgccagtttctgcat

SEQ ID NO: 443 - DNA, 27 bp, Artificial Sequence
  Description of Artificial Sequence: Synthetic probe
ataaccagttgctgcaagtcagttgaa

SEQ ID NO: 444 - DNA, 20 bp, Artificial Sequence
  Description of Artificial Sequence: Synthetic probe
aggtcgaggcagcaaaggct

SEQ ID NO: 445 - DNA, 29 bp, Artificial Sequence
  Description of Artificial Sequence: Synthetic probe
agcaaagttgccaaaataaaactcaggta

SEQ ID NO: 446 - DNA, 29 bp, Artificial Sequence
  Description of Artificial Sequence: Synthetic probe
acctcctccatttttttaagtcaaaggct

SEQ ID NO: 447 - DNA, 29 bp, Artificial Sequence
  Description of Artificial Sequence: Synthetic probe
ttgcttcttccgaataaagagatcaccac

SEQ ID NO: 448 - DNA, 25 bp, Artificial Sequence
  Description of Artificial Sequence: Synthetic probe
cctgagcttagagatgagccatgct

SEQ ID NO: 449 - DNA, 23 bp, Artificial Sequence
  Description of Artificial Sequence: Synthetic probe
gcatttcccagcacatgggtctg

SEQ ID NO: 450 - DNA, 31 bp, Artificial Sequence
  Description of Artificial Sequence: Synthetic probe
gatatcatcatactccaccaaaggtttgata

SEQ ID NO: 451 - DNA, 31 bp, Artificial Sequence
  Description of Artificial Sequence: Synthetic probe
gttttgtaacttttgggtgtttccctttttc

SEQ ID NO: 452 - DNA, 21 bp, Artificial Sequence
  Description of Artificial Sequence: Synthetic probe
caattcctcgcaacccaccct

SEQ ID NO: 453 - DNA, 25 bp, Artificial Sequence
  Description of Artificial Sequence: Synthetic probe
agttcagctcccagactggaattaa

SEQ ID NO: 454 - DNA, 29 bp, Artificial Sequence
  Description of Artificial Sequence: Synthetic probe
ttttctgatgtttctgtctcctttggagt

SEQ ID NO: 455 - DNA, 29 bp, Artificial Sequence
  Description of Artificial Sequence: Synthetic probe
cagaaaatgctttatgtttagatcaaggg

SEQ ID NO: 456 - DNA, 28 bp, Artificial Sequence
  Description of Artificial Sequence: Synthetic probe
gagatttagttcaaaaggaagggagaaa

SEQ ID NO: 457 - DNA, 32 bp, Artificial Sequence
  Description of Artificial Sequence: Synthetic probe
acctcagaatttacttttgctaaatccactta

SEQ ID NO: 458 - DNA, 23 bp, Artificial Sequence
  Description of Artificial Sequence: Synthetic probe
agaaaggcaaagattggaccagt

SEQ ID NO: 459 - DNA, 31 bp, Artificial Sequence
  Description of Artificial Sequence: Synthetic probe
ggagaagaggaaagtgcttaatcttatttgg

SEQ ID NO: 460 - DNA, 29 bp, Artificial Sequence
  Description of Artificial Sequence: Synthetic probe
cctgcctcaaaaaaacaaaacaaaacaaa

SEQ ID NO: 461 - DNA, 29 bp, Artificial Sequence
  Description of Artificial Sequence: Synthetic probe
acaaagtacaagtcaacagtatgtaagtt

SEQ ID NO: 462 - DNA, 26 bp, Artificial Sequence
  Description of Artificial Sequence: Synthetic probe
gagaatacctatcacacctgggcact

SEQ ID NO: 463 - DNA, 26 bp, Artificial Sequence
  Description of Artificial Sequence: Synthetic probe
cagccagacacagaaacgagatgttc

SEQ ID NO: 464 - DNA, 25 bp, Artificial Sequence
  Description of Artificial Sequence: Synthetic probe
taaggcccagggaaagatttagggt

SEQ ID NO: 465 - DNA, 24 bp, Artificial Sequence
  Description of Artificial Sequence: Synthetic probe
tacgcttagcaaaagcacaaaggc

SEQ ID NO: 466 - DNA, 21 bp, Artificial Sequence
  Description of Artificial Sequence: Synthetic probe
tgctgctgcatctctgggttg

SEQ ID NO: 467 - DNA, 30 bp, Artificial Sequence
  Description of Artificial Sequence: Synthetic probe
atttttaagagggtatcaacagcacctgag

SEQ ID NO: 468 - DNA, 21 bp, Artificial Sequence
  Description of Artificial Sequence: Synthetic probe
caggaggctctgcttcaggct

SEQ ID NO: 469 - DNA, 30 bp, Artificial Sequence
  Description of Artificial Sequence: Synthetic probe
gaaaggaatctttcaggacactgaagtctc

SEQ ID NO: 470 - DNA, 19 bp, Artificial Sequence
  Description of Artificial Sequence: Synthetic probe
cccgggtacagaggccact

SEQ ID NO: 471 - DNA, 26 bp, Artificial Sequence
  Description of Artificial Sequence: Synthetic probe
tggatcacctctcagacgcatactta

SEQ ID NO: 472 - DNA, 26 bp, Artificial Sequence
  Description of Artificial Sequence: Synthetic probe
catgatgagaggagctgatgagaagc

SEQ ID NO: 473 - DNA, 30 bp, Artificial Sequence
  Description of Artificial Sequence: Synthetic probe
aagctcagagaaaaaagacataaagggact

SEQ ID NO: 474 - DNA, 20 bp, Artificial Sequence
  Description of Artificial Sequence: Synthetic probe
gggtggaacttgggcaagcc

SEQ ID NO: 475 - DNA, 23 bp, Artificial Sequence
  Description of Artificial Sequence: Synthetic probe
acaagctccgtccatcttcatcc

SEQ ID NO: 476 - DNA, 22 bp, Artificial Sequence
  Description of Artificial Sequence: Synthetic probe
caagcccacactggaggagagg

SEQ ID NO: 477 - DNA, 27 bp, Artificial Sequence
  Description of Artificial Sequence: Synthetic probe
aagtctgttttcttcatggttttctga

SEQ ID NO: 478 - DNA, 20 bp, Artificial Sequence
  Description of Artificial Sequence: Synthetic probe
cagaggatgactggcctcga

SEQ ID NO: 479 - DNA, 32 bp, Artificial Sequence
  Description of Artificial Sequence: Synthetic probe
ctttgaaaatgactgctaccttatatcccttc

SEQ ID NO: 480 - DNA, 29 bp, Artificial Sequence
  Description of Artificial Sequence: Synthetic probe
catgtgttcagtcaagcaagttgtgtttc

SEQ ID NO: 481 - DNA, 26 bp, Artificial Sequence
  Description of Artificial Sequence: Synthetic probe
atttcaggtatggtgcctagtttcca

SEQ ID NO: 482 - DNA, 29 bp, Artificial Sequence
  Description of Artificial Sequence: Synthetic probe
catgtgttcagtcaagcaagttgtgtttc

SEQ ID NO: 483 - DNA, 25 bp, Artificial Sequence
  Description of Artificial Sequence: Synthetic probe
tgagcatgtagaccaggacctaagg

SEQ ID NO: 484 - DNA, 27 bp, Artificial Sequence
  Description of Artificial Sequence: Synthetic probe
tgattgtagggtctcccttgatctgag

SEQ ID NO: 485 - DNA, 27 bp, Artificial Sequence
  Description of Artificial Sequence: Synthetic probe
gtagaaccttctgggatttcaggtatg

SEQ ID NO: 486 - DNA, 27 bp, Artificial Sequence
  Description of Artificial Sequence: Synthetic probe
tgattgtagggtctcccttgatctgag

SEQ ID NO: 487 - DNA, 20 bp, Artificial Sequence
  Description of Artificial Sequence: Synthetic probe
aacctgccacctcctttccc

SEQ ID NO: 488 - DNA, 22 bp, Artificial Sequence
  Description of Artificial Sequence: Synthetic probe
gtggccctttcccaagtgatcc

SEQ ID NO: 489 - DNA, 20 bp, Artificial Sequence
  Description of Artificial Sequence: Synthetic probe
cctccctgcctctccacagc

SEQ ID NO: 490 - DNA, 22 bp, Artificial Sequence
  Description of Artificial Sequence: Synthetic probe
gtggccctttcccaagtgatcc

SEQ ID NO: 491 - DNA, 24 bp, Artificial Sequence
  Description of Artificial Sequence: Synthetic probe
gcaccttctttcccatttgagttg

SEQ ID NO: 492 - DNA, 22 bp, Artificial Sequence
  Description of Artificial Sequence: Synthetic probe
tggtgctgtcccaaggcttttt

SEQ ID NO: 493 - DNA, 26 bp, Artificial Sequence
  Description of Artificial Sequence: Synthetic probe
ttattttcctctcctctctgagcctc

SEQ ID NO: 494 - DNA, 23 bp, Artificial Sequence
  Description of Artificial Sequence: Synthetic probe
tctgactcccttctccctctctc

SEQ ID NO: 495 - DNA, 24 bp, Artificial Sequence
  Description of Artificial Sequence: Synthetic probe
ctgaaattggctgattttggcctg

SEQ ID NO: 496 - DNA, 23 bp, Artificial Sequence
  Description of Artificial Sequence: Synthetic probe
tctgactcccttctccctctctc

SEQ ID NO: 497 - DNA, 19 bp, Artificial Sequence
  Description of Artificial Sequence: Synthetic probe
cgtcctgcacagcgacaag

SEQ ID NO: 498 - DNA, 20 bp, Artificial Sequence
  Description of Artificial Sequence: Synthetic probe
gtgccgcatcctcaccctga

SEQ ID NO: 499 - DNA, 22 bp, Artificial Sequence
  Description of Artificial Sequence: Synthetic probe
cagagtcttaaaaccgagggcc

SEQ ID NO: 500 - DNA, 33 bp, Artificial Sequence
  Description of Artificial Sequence: Synthetic probe
agggataactctgtaagtacattatttacattg

SEQ ID NO: 501 - DNA, 30 bp, Artificial Sequence
  Description of Artificial Sequence: Synthetic probe
ctaatgcttatgtccatgtgtggttctttt

SEQ ID NO: 502 - DNA, 31 bp, Artificial Sequence
  Description of Artificial Sequence: Synthetic probe
ggcaaatatgattgaaatgtaatctgagaac

SEQ ID NO: 503 - DNA, 24 bp, Artificial Sequence
  Description of Artificial Sequence: Synthetic probe
gccaacagccaccttctcagtaac

SEQ ID NO: 504 - DNA, 26 bp, Artificial Sequence
  Description of Artificial Sequence: Synthetic probe
gctcaacttccgttttgagtgtttac

SEQ ID NO: 505 - DNA, 28 bp, Artificial Sequence
  Description of Artificial Sequence: Synthetic probe
atacaggttacttctttgcttattgcca

SEQ ID NO: 506 - DNA, 21 bp, Artificial Sequence
  Description of Artificial Sequence: Synthetic probe
acctggagaccttcgagcacc

SEQ ID NO: 507 - DNA, 20 bp, Artificial Sequence
  Description of Artificial Sequence: Synthetic probe
ccagctagttgagcgcaccc

SEQ ID NO: 508 - DNA, 19 bp, Artificial Sequence
  Description of Artificial Sequence: Synthetic probe
ggacaccggcccagacaca

SEQ ID NO: 509 - DNA, 31 bp, Artificial Sequence
  Description of Artificial Sequence: Synthetic probe
gtactcataagtcagttgataataacgatga

SEQ ID NO: 510 - DNA, 32 bp, Artificial Sequence
  Description of Artificial Sequence: Synthetic probe
ttagttactcttaacaatccctgactgtttgc

SEQ ID NO: 511 - DNA, 33 bp, Artificial Sequence
  Description of Artificial Sequence: Synthetic probe
tacagacgactagaaaagtatccaactgtaatg

SEQ ID NO: 512 - DNA, 32 bp, Artificial Sequence
  Description of Artificial Sequence: Synthetic probe
gctacactgtgacttagcaaagatataacata

SEQ ID NO: 513 - DNA, 27 bp, Artificial Sequence
  Description of Artificial Sequence: Synthetic probe
attaaataatcgggcaaagcccatgtc

SEQ ID NO: 514 - DNA, 28 bp, Artificial Sequence
  Description of Artificial Sequence: Synthetic probe
ccatcacactcagtctgctcttactttt

SEQ ID NO: 515 - DNA, 27 bp, Artificial Sequence
  Description of Artificial Sequence: Synthetic probe
cgaagacatctaagttcaaacaacagt

SEQ ID NO: 516 - DNA, 32 bp, Artificial Sequence
  Description of Artificial Sequence: Synthetic probe
tacactgagtattctggtaaagcaaaaatcaa

SEQ ID NO: 517 - DNA, 31 bp, Artificial Sequence
  Description of Artificial Sequence: Synthetic probe
cagttgggctagtcaattaaggaaaaaatgc

SEQ ID NO: 518 - DNA, 28 bp, Artificial Sequence
  Description of Artificial Sequence: Synthetic probe
catactccaaaacttccatcatgctgat

SEQ ID NO: 519 - DNA, 25 bp, Artificial Sequence
  Description of Artificial Sequence: Synthetic probe
tttgtcatcaggttcttcttccgtt

SEQ ID NO: 520 - DNA, 28 bp, Artificial Sequence
  Description of Artificial Sequence: Synthetic probe
acactgacatgcagtcaatacaaaataa

SEQ ID NO: 521 - DNA, 21 bp, Artificial Sequence
  Description of Artificial Sequence: Synthetic probe
gcagcattcgcaacagtgcat

SEQ ID NO: 522 - DNA, 22 bp, Artificial Sequence
  Description of Artificial Sequence: Synthetic probe
cgagtcgtactgctttgccatg

SEQ ID NO: 523 - DNA, 26 bp, Artificial Sequence
  Description of Artificial Sequence: Synthetic probe
ggacagacgacttctctaccaactcg

SEQ ID NO: 524 - DNA, 19 bp, Artificial Sequence
  Description of Artificial Sequence: Synthetic probe
gcacgcccgatccgtactc

SEQ ID NO: 525 - DNA, 33 bp, Artificial Sequence
  Description of Artificial Sequence: Synthetic probe
agtgtcatcttctcgtaagaaccaaataactta

SEQ ID NO: 526 - DNA, 24 bp, Artificial Sequence
  Description of Artificial Sequence: Synthetic probe
gatgtagtagaggccgttaagcag

SEQ ID NO: 527 - DNA, 19 bp, Artificial Sequence
  Description of Artificial Sequence: Synthetic probe
agatgcctggccctcaccc

SEQ ID NO: 528 - DNA, 24 bp, Artificial Sequence
  Description of Artificial Sequence: Synthetic probe
agggcaagagtgggtcctttagtg

SEQ ID NO: 529 - DNA, 21 bp, Artificial Sequence
  Description of Artificial Sequence: Synthetic probe
gggacctcgatctctgcaccc

SEQ ID NO: 530 - DNA, 20 bp, Artificial Sequence
  Description of Artificial Sequence: Synthetic probe
cctcaccgagcaacagctcc

SEQ ID NO: 531 - DNA, 21 bp, Artificial Sequence
  Description of Artificial Sequence: Synthetic probe
gggacctcgatctctgcaccc

SEQ ID NO: 532 - DNA, 21 bp, Artificial Sequence
  Description of Artificial Sequence: Synthetic probe
ttgtcgatgaggtccagtgcg

SEQ ID NO: 533 - DNA, 29 bp, Artificial Sequence
  Description of Artificial Sequence: Synthetic probe
gcagaagaaaaaaaacacaagagccctag

SEQ ID NO: 534 - DNA, 22 bp, Artificial Sequence
  Description of Artificial Sequence: Synthetic probe
tgtgccacacatctttgacctc

SEQ ID NO: 535 - DNA, 32 bp, Artificial Sequence
  Description of Artificial Sequence: Synthetic probe
acatgaataaatgagcatccattttgtttcag

SEQ ID NO: 536 - DNA, 19 bp, Artificial Sequence
  Description of Artificial Sequence: Synthetic probe
ccgtggacctggctgagga

SEQ ID NO: 537 - DNA, 26 bp, Artificial Sequence
  Description of Artificial Sequence: Synthetic probe
tctgaccattctgttctctctggcag

SEQ ID NO: 538 - DNA, 20 bp, Artificial Sequence
  Description of Artificial Sequence: Synthetic probe
tggctggtcaccagagggtg

SEQ ID NO: 539 - DNA, 18 bp, Artificial Sequence
  Description of Artificial Sequence: Synthetic probe
ctggaggcggcgagaaca

SEQ ID NO: 540 - DNA, 19 bp, Artificial Sequence
  Description of Artificial Sequence: Synthetic probe
cgcaagagccgcgacaagg

SEQ ID NO: 541 - DNA, 19 bp, Artificial Sequence
  Description of Artificial Sequence: Synthetic probe
gctacctggacggcaggct

SEQ ID NO: 542 - DNA, 21 bp, Artificial Sequence
  Description of Artificial Sequence: Synthetic probe
cgccatgccgggagaactcta

SEQ ID NO: 543 - DNA, 20 bp, Artificial Sequence
  Description of Artificial Sequence: Synthetic probe
ctgccgagcagcagcagaag

SEQ ID NO: 544 - DNA, 21 bp, Artificial Sequence
  Description of Artificial Sequence: Synthetic probe
ccatgggcatcctctgtccta

SEQ ID NO: 545 - DNA, 24 bp, Artificial Sequence
  Description of Artificial Sequence: Synthetic probe
gaagacaatgggcatggcctctta

SEQ ID NO: 546 - DNA, 25 bp, Artificial Sequence
  Description of Artificial Sequence: Synthetic probe
atctttgactgtgtctacacggttc

SEQ ID NO: 547 - DNA, 22 bp, Artificial Sequence
  Description of Artificial Sequence: Synthetic probe
agaaggcccaagactaaccctg

SEQ ID NO: 548 - DNA, 22 bp, Artificial Sequence
  Description of Artificial Sequence: Synthetic probe
tcttcccaccctagacctggac

SEQ ID NO: 549 - DNA, 24 bp, Artificial Sequence
  Description of Artificial Sequence: Synthetic probe
tgagcagtgcagtgatgatgagtg

SEQ ID NO: 550 - DNA, 20 bp, Artificial Sequence
  Description of Artificial Sequence: Synthetic probe
cactcagcacctccctcacc

SEQ ID NO: 551 - DNA, 23 bp, Artificial Sequence
  Description of Artificial Sequence: Synthetic probe
gggactgtggttcttcctcccag

SEQ ID NO: 552 - DNA, 19 bp, Artificial Sequence
  Description of Artificial Sequence: Synthetic probe
gggacctgtgtgcgtggca

SEQ ID NO: 553 - DNA, 20 bp, Artificial Sequence
  Description of Artificial Sequence: Synthetic probe
gtccaggaactgcctgccag

SEQ ID NO: 554 - DNA, 23 bp, Artificial Sequence
  Description of Artificial Sequence: Synthetic probe
gcctgctcactgctttgcttcat

SEQ ID NO: 555 - DNA, 21 bp, Artificial Sequence
  Description of Artificial Sequence: Synthetic probe
gccacattctgcttttgccag

SEQ ID NO: 556 - DNA, 23 bp, Artificial Sequence
  Description of Artificial Sequence: Synthetic probe
aacaccacctgattctctcctgc

SEQ ID NO: 557 - DNA, 32 bp, Artificial Sequence
  Description of Artificial Sequence: Synthetic probe
gacaaaatggacaaataaacaaggacatcttc

SEQ ID NO: 558 - DNA, 31 bp, Artificial Sequence
  Description of Artificial Sequence: Synthetic probe
atctttctaatccctaaactaccttggtata

SEQ ID NO: 559 - DNA, 24 bp, Artificial Sequence
  Description of Artificial Sequence: Synthetic probe
ctctatcatgttcagggagcctgg

SEQ ID NO: 560 - DNA, 19 bp, Artificial Sequence
  Description of Artificial Sequence: Synthetic probe
tgccctgatgggtggcagg

SEQ ID NO: 561 - DNA, 21 bp, Artificial Sequence
  Description of Artificial Sequence: Synthetic probe
agggagggcagttgtaaccct

SEQ ID NO: 562 - DNA, 20 bp, Artificial Sequence
  Description of Artificial Sequence: Synthetic probe
ctgtccctctctcccaccag

SEQ ID NO: 563 - DNA, 17 bp, Artificial Sequence
  Description of Artificial Sequence: Synthetic probe
tgcacctgcctgccact

SEQ ID NO: 564 - DNA, 21 bp, Artificial Sequence
  Description of Artificial Sequence: Synthetic probe
taatggcaacgaagcagagcc

SEQ ID NO: 565 - DNA, 24 bp, Artificial Sequence
  Description of Artificial Sequence: Synthetic probe
ccactcatacaggacttgggaggt

SEQ ID NO: 566 - DNA, 24 bp, Artificial Sequence
  Description of Artificial Sequence: Synthetic probe
gttttgtcagttcagggattgcac

SEQ ID NO: 567 - DNA, 30 bp, Artificial Sequence
  Description of Artificial Sequence: Synthetic probe
tcttctactttttagcttcaagcattctga

SEQ ID NO: 568 - DNA, 28 bp, Artificial Sequence
  Description of Artificial Sequence: Synthetic probe
tgcattctgactttcagtaaggcaatga

SEQ ID NO: 569 - DNA, 22 bp, Artificial Sequence
  Description of Artificial Sequence: Synthetic probe
tgcagccttattaaccaccacc

SEQ ID NO: 570 - DNA, 35 bp, Artificial Sequence
  Description of Artificial Sequence: Synthetic probe
gctccatgaaaaccacataaagaataattctctta

SEQ ID NO: 571 - DNA, 21 bp, Artificial Sequence
  Description of Artificial Sequence: Synthetic probe
ggttatgcaaggtcccagcgg

SEQ ID NO: 572 - DNA, 35 bp, Artificial Sequence; identical to SEQ ID NO: 570
  Description of Artificial Sequence: Synthetic probe

SEQ ID NO: 573 - DNA, 30 bp, Artificial Sequence
  Description of Artificial Sequence: Synthetic probe
ctgcagatgctatacacaagactcagaata

SEQ ID NO: 574 - DNA, 28 bp, Artificial Sequence
  Description of Artificial Sequence: Synthetic probe
cagatggtcagtacaagcacatactcat

SEQ ID NO: 575 - DNA, 28 bp, Artificial Sequence
  Description of Artificial Sequence: Synthetic probe
caacagctagagatgcttcattttcaat

SEQ ID NO: 576 - DNA, 28 bp, Artificial Sequence
  Description of Artificial Sequence: Synthetic probe
cagatggtcagtacaagcacatactcat

SEQ ID NO: 577 - DNA, 22 bp, Artificial Sequence
  Description of Artificial Sequence: Synthetic probe
gcttagacagccatccaacagc

SEQ ID NO: 578 - DNA, 32 bp, Artificial Sequence
  Description of Artificial Sequence: Synthetic probe
agatagccaggtatcactgtaagaatttacct

SEQ ID NO: 579 - DNA, 32 bp, Artificial Sequence
  Description of Artificial Sequence: Synthetic probe
tatggacataaaacctagaacacttcacttaa

SEQ ID NO: 580 - DNA, 20 bp, Artificial Sequence
  Description of Artificial Sequence: Synthetic probe
tcagaggagctgtggctccc

SEQ ID NO: 581 - DNA, 27 bp, Artificial Sequence
  Description of Artificial Sequence: Synthetic probe
ccatacctgctctaggaaactaccaga

SEQ ID NO: 582 - DNA, 29 bp, Artificial Sequence
  Description of Artificial Sequence: Synthetic probe
ttagcttgatctggagttaatcgagaaat

SEQ ID NO: 583 - DNA, 29 bp, Artificial Sequence
  Description of Artificial Sequence: Synthetic probe
gagtaaaagtattttacccaaactggctt

SEQ ID NO: 584 - DNA, 23 bp, Artificial Sequence
  Description of Artificial Sequence: Synthetic probe
tcctcttcttcacctccctgctg

SEQ ID NO: 585 - DNA, 20 bp, Artificial Sequence
  Description of Artificial Sequence: Synthetic probe
cccactctcaccctgcatct

SEQ ID NO: 586 - DNA, 18 bp, Artificial Sequence
  Description of Artificial Sequence: Synthetic probe
atagggcaggtgcggcga

SEQ ID NO: 587 - DNA, 20 bp, Artificial Sequence
  Description of Artificial Sequence: Synthetic probe
cgagtatgctctcggccctg

SEQ ID NO: 588 - DNA, 21 bp, Artificial Sequence
  Description of Artificial Sequence: Synthetic probe
acttgtccaggtgaacgcaga

SEQ ID NO: 589 - DNA, 20 bp, Artificial Sequence
  Description of Artificial Sequence: Synthetic probe
gacaaagccgtgagcaacgt

SEQ ID NO: 590 - DNA, 20 bp, Artificial Sequence
  Description of Artificial Sequence: Synthetic probe
gggctaatgccttcatggcc

SEQ ID NO: 591 - DNA, 21 bp, Artificial Sequence
  Description of Artificial Sequence: Synthetic probe
tcctggcttgacaagaggccc

SEQ ID NO: 592 - DNA, 22 bp, Artificial Sequence
  Description of Artificial Sequence: Synthetic probe
gcccatttggtagtgaggcagg

SEQ ID NO: 593 - DNA, 29 bp, Artificial Sequence
  Description of Artificial Sequence: Synthetic probe
ctagcatatagctgagtaatagccatgtt

SEQ ID NO: 594 - DNA, 26 bp, Artificial Sequence
  Description of Artificial Sequence: Synthetic probe
acatgggctttcttgatgtaaccatc

SEQ ID NO: 595 - DNA, 23 bp, Artificial Sequence
  Description of Artificial Sequence: Synthetic probe
aatggagggtgtgcaagtcaatc

SEQ ID NO: 596 - DNA, 28 bp, Artificial Sequence
  Description of Artificial Sequence: Synthetic probe
aagtcaaaatatggtcttggacatccag

SEQ ID NO: 597 - DNA, 20 bp, Artificial Sequence
  Description of Artificial Sequence: Synthetic probe
gcttcctgggctagtgacct

SEQ ID NO: 598 - DNA, 32 bp, Artificial Sequence
  Description of Artificial Sequence: Synthetic probe
caatttcccattctaataaagtttcccaggat

SEQ ID NO: 599 - DNA, 23 bp, Artificial Sequence
  Description of Artificial Sequence: Synthetic probe
ccacactatgatttgtgcctcct

SEQ ID NO: 600 - DNA, 23 bp, Artificial Sequence
  Description of Artificial Sequence: Synthetic probe
cactggcttcagagcggaagtag

SEQ ID NO: 601 - DNA, 24 bp, Artificial Sequence
  Description of Artificial Sequence: Synthetic probe
tgtgcattcctccttcatcacctt

SEQ ID NO: 602 - DNA, 24 bp, Artificial Sequence
  Description of Artificial Sequence: Synthetic probe
caactctccacccttcttcatccc

SEQ ID NO: 603 - DNA, 24 bp, Artificial Sequence
  Description of Artificial Sequence: Synthetic probe
catgaccattctgcacctcctcac

SEQ ID NO: 604 - DNA, 25 bp, Artificial Sequence
  Description of Artificial Sequence: Synthetic probe
tacctacctgatgcttgctgaggtt

SEQ ID NO: 605 - DNA, 27 bp, Artificial Sequence
  Description of Artificial Sequence: Synthetic probe
tttttatccaaccaccttcttcgagct

SEQ ID NO: 606 - DNA, 31 bp, Artificial Sequence
  Description of Artificial Sequence: Synthetic probe
aggagtattcctggtcctaaagatgaaatac

SEQ ID NO: 607 - DNA, 25 bp, Artificial Sequence
  Description of Artificial Sequence: Synthetic probe
actttaaggctcactgctccctatt

SEQ ID NO: 608 - DNA, 20 bp, Artificial Sequence
  Description of Artificial Sequence: Synthetic probe
tgagcccacaagccagttgt

SEQ ID NO: 609 - DNA, 25 bp, Artificial Sequence
  Description of Artificial Sequence: Synthetic probe
tacacaggtccacatccattcatcc

SEQ ID NO: 610 - DNA, 21 bp, Artificial Sequence
  Description of Artificial Sequence: Synthetic probe
ggacctgagccgtaggaacat

SEQ ID NO: 611 - DNA, 20 bp, Artificial Sequence
  Description of Artificial Sequence: Synthetic probe
ccctgccctctctgcctttt

SEQ ID NO: 612 - DNA, 24 bp, Artificial Sequence
  Description of Artificial Sequence: Synthetic probe
accagtgttggctggtgaatgaat

SEQ ID NO: 613 - DNA, 28 bp, Artificial Sequence
  Description of Artificial Sequence: Synthetic probe
atccaggtttctgttgttacagtctctc

SEQ ID NO: 614 - DNA, 25 bp, Artificial Sequence
  Description of Artificial Sequence: Synthetic probe
ctcctccttggctcatcttcaaacc

SEQ ID NO: 615 - DNA, 24 bp, Artificial Sequence
  Description of Artificial Sequence: Synthetic probe
ccggctcttctttgagttctaccg

SEQ ID NO: 616 - DNA, 18 bp, Artificial Sequence
  Description of Artificial Sequence: Synthetic probe
cctggacagcaggcccat

SEQ ID NO: 617 - DNA, 23 bp, Artificial Sequence
  Description of Artificial Sequence: Synthetic probe
ccaagtaacggtgctgtctgctg

SEQ ID NO: 618 - DNA, 18 bp, Artificial Sequence
  Description of Artificial Sequence: Synthetic probe
agctcccttggctgagcc

SEQ ID NO: 619 - DNA, 18 bp, Artificial Sequence
  Description of Artificial Sequence: Synthetic probe
cccttcccgctgctgtct

SEQ ID NO: 620 - DNA, 22 bp, Artificial Sequence
  Description of Artificial Sequence: Synthetic probe
gcttttgcgtggagtgtgtgga

SEQ ID NO: 621 - DNA, 18 bp, Artificial Sequence
  Description of Artificial Sequence: Synthetic probe
cccttcccgctgctgtct

SEQ ID NO: 622 - DNA, 20 bp, Artificial Sequence
  Description of Artificial Sequence: Synthetic probe
ggagaggcccttcggtggta

SEQ ID NO: 623 - DNA, 21 bp, Artificial Sequence
  Description of Artificial Sequence: Synthetic probe
cctctgacgccagctctcctc

SEQ ID NO: 624 - DNA, 24 bp, Artificial Sequence
  Description of Artificial Sequence: Synthetic probe
gtttcctgtcagcctgtaactgac

SEQ ID NO: 625 - DNA, 18 bp, Artificial Sequence
  Description of Artificial Sequence: Synthetic probe
accctggcgtgtcaccct

SEQ ID NO: 626 - DNA, 21 bp, Artificial Sequence
  Description of Artificial Sequence: Synthetic probe
tgcaagtgtaagcctcggcaa

SEQ ID NO: 627 - DNA, 27 bp, Artificial Sequence
  Description of Artificial Sequence: Synthetic probe
cgtgaccactgtgtaatgatttctgct

SEQ ID NO: 628 - DNA, 29 bp, Artificial Sequence
  Description of Artificial Sequence: Synthetic probe
gagaggtcaaggtgactttttgttttttg

SEQ ID NO: 629 - DNA, 32 bp, Artificial Sequence
  Description of Artificial Sequence: Synthetic probe
tctcagagctaagtatcaaggatttcattctc

SEQ ID NO: 630 - DNA, 17 bp, Artificial Sequence
  Description of Artificial Sequence: Synthetic probe
acctgagcgcgactgca

SEQ ID NO: 631 - DNA, 25 bp, Artificial Sequence
  Description of Artificial Sequence: Synthetic probe
ccctaatgccctaatgtctgtctct

SEQ ID NO: 632 - DNA, 23 bp, Artificial Sequence
  Description of Artificial Sequence: Synthetic probe
cactccagtaattctgccgacca

SEQ ID NO: 633 - DNA, 24 bp, Artificial Sequence
  Description of Artificial Sequence: Synthetic probe
tgaagcctcaagagcagtggaaaa

SEQ ID NO: 634 - DNA, 29 bp, Artificial Sequence
  Description of Artificial Sequence: Synthetic probe
taaccctcctcttgtgtatctttcttaca

SEQ ID NO: 635 - DNA, 22 bp, Artificial Sequence
  Description of Artificial Sequence: Synthetic probe
ggatccacctctggcctcacag

SEQ ID NO: 636 - DNA, 27 bp, Artificial Sequence
  Description of Artificial Sequence: Synthetic probe
gcctccaaagaccacgataattccttc

SEQ ID NO: 637 - DNA, 30 bp, Artificial Sequence
  Description of Artificial Sequence: Synthetic probe
cagtgacatcaataccctctatttctgttt

SEQ ID NO: 638 - DNA, 31 bp, Artificial Sequence
  Description of Artificial Sequence: Synthetic probe
aaatgagcttgctaagtaattcagtggctat

SEQ ID NO: 639 - DNA, 29 bp, Artificial Sequence
  Description of Artificial Sequence: Synthetic probe
accatcaaggtaaaaattatgccaactat

SEQ ID NO: 640 - DNA, 27 bp, Artificial Sequence
  Description of Artificial Sequence: Synthetic probe
tcttctctgagctaacatgcttcctta

SEQ ID NO: 641 - DNA, 30 bp, Artificial Sequence
  Description of Artificial Sequence: Synthetic probe
aattatctcttggtttgacacttggttgac

SEQ ID NO: 642 - DNA, 30 bp, Artificial Sequence
  Description of Artificial Sequence: Synthetic probe
agtggtcagtgtgctaaccattgattattc

SEQ ID NO: 643 - DNA, 28 bp, Artificial Sequence
  Description of Artificial Sequence: Synthetic probe
taagagctgcatgaaaatgttgatgtgt

SEQ ID NO: 644 - DNA, 31 bp, Artificial Sequence
  Description of Artificial Sequence: Synthetic probe
gttctatatttaaccgacctatttgaacagg

SEQ ID NO: 645 - DNA, 30 bp, Artificial Sequence
  Description of Artificial Sequence: Synthetic probe
ctttgccttttctttcattttcctttcttg

SEQ ID NO: 646 - DNA, 33 bp, Artificial Sequence
  Description of Artificial Sequence: Synthetic probe
tgtacaactggataactacttgaacttatattc

SEQ ID NO: 647 - DNA, 35 bp, Artificial Sequence
  Description of Artificial Sequence: Synthetic probe
tctttgtcaaaaggagactcaatatctttactctt

SEQ ID NO: 648 - DNA, 25 bp, Artificial Sequence
  Description of Artificial Sequence: Synthetic probe
tttgccctcaccaaaactttctctc

SEQ ID NO: 649 - DNA, 27 bp, Artificial Sequence
  Description of Artificial Sequence: Synthetic probe
accaagtattggtttgtattttgcagt

SEQ ID NO: 650 - DNA, 26 bp, Artificial Sequence
  Description of Artificial Sequence: Synthetic probe
atgtcgttggtttggctaacactaca

SEQ ID NO: 651 - DNA, 25 bp, Artificial Sequence
  Description of Artificial Sequence: Synthetic probe
cagttgtttgaatccctggaacaat

SEQ ID NO: 652 - DNA, 29 bp, Artificial Sequence
  Description of Artificial Sequence: Synthetic probe
caagtttcttctctgttctgttttgtttt

SEQ ID NO: 653 - DNA, 29 bp, Artificial Sequence
  Description of Artificial Sequence: Synthetic probe
ctgtcatgcagaaatggtttctctacttg

SEQ ID NO: 654 - DNA, 33 bp, Artificial Sequence
  Description of Artificial Sequence: Synthetic probe
acagatgttttcctctaagaatgacattatttc

SEQ ID NO: 655 - DNA, 30 bp, Artificial Sequence
  Description of Artificial Sequence: Synthetic probe
tttggctgacttttcattctttttgatgtt

SEQ ID NO: 656 - DNA, 29 bp, Artificial Sequence
  Description of Artificial Sequence: Synthetic probe
caaagattggtcatttttctactgatgcc

SEQ ID NO: 657 - DNA, 28 bp, Artificial Sequence
  Description of Artificial Sequence: Synthetic probe
atgtttgaggatgtaagctagtttcaaa

SEQ ID NO: 658 - DNA, 33 bp, Artificial Sequence
  Description of Artificial Sequence: Synthetic probe
taaaatgagagcacttttttttctgtttatccc

SEQ ID NO: 659 - DNA, 30 bp, Artificial Sequence
  Description of Artificial Sequence: Synthetic probe
gaaataatgtttgtcgtaatttggctgttt

SEQ ID NO: 660 - DNA, 34 bp, Artificial Sequence
  Description of Artificial Sequence: Synthetic probe
ggactctgaatgagtataaggtagaaaatagatt

SEQ ID NO: 661 - DNA, 35 bp, Artificial Sequence
  Description of Artificial Sequence: Synthetic probe
taactgcatagatacaatttttctcaggatcttag

SEQ ID NO: 662 - DNA, 30 bp, Artificial Sequence
  Description of Artificial Sequence: Synthetic probe
gagagagaccgtgtctcaaaataaataaaa

SEQ ID NO: 663 - DNA, 22 bp, Artificial Sequence
  Description of Artificial Sequence: Synthetic probe
aggacgcaaggagggtttgtca

SEQ ID NO: 664 - DNA, 26 bp, Artificial Sequence
  Description of Artificial Sequence: Synthetic probe
tgatctcaaggaaacaggaaaggacg

SEQ ID NO: 665 - DNA, 28 bp, Artificial Sequence
  Description of Artificial Sequence: Synthetic probe
gcctttctccacttagattttctccaat

SEQ ID NO: 666 - DNA, 19 bp, Artificial Sequence
  Description of Artificial Sequence: Synthetic probe
ccttggcatcccagcctct

SEQ ID NO: 667 - DNA, 26 bp, Artificial Sequence
  Description of Artificial Sequence: Synthetic probe
gagatagtgtgtatgcgacacttaca

SEQ ID NO: 668 - DNA, 24 bp, Artificial Sequence
  Description of Artificial Sequence: Synthetic probe
ggtctgaggctgttcactgactta

SEQ ID NO: 669 - DNA, 20 bp, Artificial Sequence
  Description of Artificial Sequence: Synthetic probe
ctgctccagggaggctgctg

SEQ ID NO: 670 - DNA, 24 bp, Artificial Sequence
  Description of Artificial Sequence: Synthetic probe
caaggatgcctgaccagttagagg

SEQ ID NO: 671 - DNA, 20 bp, Artificial Sequence
  Description of Artificial Sequence: Synthetic probe
ctcagcagccgagaacaagc

SEQ ID NO: 672 - DNA, 24 bp, Artificial Sequence
  Description of Artificial Sequence: Synthetic probe
gccactgatggaggtgcagttttt

SEQ ID NO: 673 - DNA, 29 bp, Artificial Sequence
  Description of Artificial Sequence: Synthetic probe
atgtcgaaaagttctctctctaaaacact

SEQ ID NO: 674 - DNA, 30 bp, Artificial Sequence
  Description of Artificial Sequence: Synthetic probe
actaaaaaggcaaatgtaatctaccaggct

SEQ ID NO: 675 - DNA, 30 bp, Artificial Sequence
  Description of Artificial Sequence: Synthetic probe
acccattagaaccaactccataaactaaac

SEQ ID NO: 676 - DNA, 27 bp, Artificial Sequence
  Description of Artificial Sequence: Synthetic probe
ataacaacaacctggagccttattttt

SEQ ID NO: 677 - DNA, 23 bp, Artificial Sequence
  Description of Artificial Sequence: Synthetic probe
ccttcccatgaaatggacgtgga

SEQ ID NO: 678 - DNA, 30 bp, Artificial Sequence
  Description of Artificial Sequence: Synthetic probe
aaatgttctgttctccttcactttccactc

SEQ ID NO: 679 - DNA, 24 bp, Artificial Sequence
  Description of Artificial Sequence: Synthetic probe
aggaaatgcagttttagtgggaga

SEQ ID NO: 680 - DNA, 26 bp, Artificial Sequence
  Description of Artificial Sequence: Synthetic probe
aaggcagaataacatggctttgagac

SEQ ID NO: 681 - DNA, 21 bp, Artificial Sequence
  Description of Artificial Sequence: Synthetic probe
ggtggcagaaaggaaaagcgg

SEQ ID NO: 682 - DNA, 25 bp, Artificial Sequence
  Description of Artificial Sequence: Synthetic probe
gtgacacagagctgtgaacacttac

SEQ ID NO: 683 - DNA, 20 bp, Artificial Sequence
  Description of Artificial Sequence: Synthetic probe
cccacccaggactggcactc

SEQ ID NO: 684 - DNA, 19 bp, Artificial Sequence
  Description of Artificial Sequence: Synthetic probe
gaccatgagaggccctgcg

SEQ ID NO: 685 - DNA, 23 bp, Artificial Sequence
  Description of Artificial Sequence: Synthetic probe
aaaaggtgggcctgaggttcaga

SEQ ID NO: 686 - DNA, 25 bp, Artificial Sequence
  Description of Artificial Sequence: Synthetic probe
cccgtatctcccttccctgattacc

SEQ ID NO: 687 - DNA, 25 bp, Artificial Sequence
  Description of Artificial Sequence: Synthetic probe
gctgacctaaagccacctccttact

SEQ ID NO: 688 - DNA, 22 bp, Artificial Sequence
  Description of Artificial Sequence: Synthetic probe
taaaagccagcttggcctcagt

SEQ ID NO: 689 - DNA, 22 bp, Artificial Sequence
  Description of Artificial Sequence: Synthetic probe
cagctaggcagtgtggacagac

SEQ ID NO: 690 - DNA, 22 bp, Artificial Sequence
  Description of Artificial Sequence: Synthetic probe
gggactcttcccaatggaagca

SEQ ID NO: 691 - DNA, 27 bp, Artificial Sequence
  Description of Artificial Sequence: Synthetic probe
ttgttcaaatgagtagacacagcttga

SEQ ID NO: 692 - DNA, 28 bp, Artificial Sequence
  Description of Artificial Sequence: Synthetic probe
agtggagagctgtaaattctggcttata

SEQ ID NO: 693 - DNA, 22 bp, Artificial Sequence
  Description of Artificial Sequence: Synthetic probe
gagtgggtcgaggaggttgagg

SEQ ID NO: 694 - DNA, 22 bp, Artificial Sequence
  Description of Artificial Sequence: Synthetic probe
tcctggtagtgtgggtctctgc

SEQ ID NO: 695 - DNA, 25 bp, Artificial Sequence
  Description of Artificial Sequence: Synthetic probe
ctgggtatcgaaagagtctggattt

SEQ ID NO: 696 - DNA, 17 bp, Artificial Sequence
  Description of Artificial Sequence: Synthetic probe
tgctccaatccgcgcct

SEQ ID NO: 697 - DNA, 29 bp, Artificial Sequence
  Description of Artificial Sequence: Synthetic probe
tttaagccaataaaactctttccaactca

SEQ ID NO: 698 - DNA, 29 bp, Artificial Sequence
  Description of Artificial Sequence: Synthetic probe
tgaacagcatgaaaacaagtagtataggc

SEQ ID NO: 699 - DNA, 25 bp, Artificial Sequence
  Description of Artificial Sequence: Synthetic probe
caccaactgtgcaagaatatgatgc

SEQ ID NO: 700 - DNA, 28 bp, Artificial Sequence
  Description of Artificial Sequence: Synthetic probe
caccaactgtctgctaaagctcacttat

SEQ ID NO: 701 - DNA, 28 bp, Artificial Sequence
  Description of Artificial Sequence: Synthetic probe
cattgaggcatgatagactacattcctg

SEQ ID NO: 702 - DNA, 31 bp, Artificial Sequence
  Description of Artificial Sequence: Synthetic probe
tagaatgaaacaaggattcacctttaacctg

SEQ ID NO: 703 - DNA, 30 bp, Artificial Sequence
  Description of Artificial Sequence: Synthetic probe
cccagccactattactttttcttgaaaaaa

SEQ ID NO: 704 - DNA, 29 bp, Artificial Sequence
  Description of Artificial Sequence: Synthetic probe
attcaacagggcctttctatttaggtaag

SEQ ID NO: 705 - DNA, 32 bp, Artificial Sequence
  Description of Artificial Sequence: Synthetic probe
tttgtaatttgtgtccatttgctatttccctt

SEQ ID NO: 706 - DNA, 19 bp, Artificial Sequence
  Description of Artificial Sequence: Synthetic probe
ggcatccacagggcagggt

SEQ ID NO: 707 - DNA, 22 bp, Artificial Sequence
  Description of Artificial Sequence: Synthetic probe
taaacagagggctcagcccagc

SEQ ID NO: 708 - DNA, 26 bp, Artificial Sequence
  Description of Artificial Sequence: Synthetic probe
accaagagaaggtttcaatgacggtg

SEQ ID NO: 709 - DNA, 19 bp, Artificial Sequence
  Description of Artificial Sequence: Synthetic probe
gaagaggcagcagggaggg

SEQ ID NO: 710 - DNA, 25 bp, Artificial Sequence
  Description of Artificial Sequence: Synthetic probe
ccctcatcagcatcaccttctaggg

SEQ ID NO: 711 - DNA, 29 bp, Artificial Sequence
  Description of Artificial Sequence: Synthetic probe
accaaaatgagaaaactgtgtttctccct

SEQ ID NO: 712 - DNA, 22 bp, Artificial Sequence
  Description of Artificial Sequence: Synthetic probe
aggcacataccaggcagtcaga

SEQ ID NO: 713 - DNA, 29 bp, Artificial Sequence
  Description of Artificial Sequence: Synthetic probe
accaaaatgagaaaactgtgtttctccct

SEQ ID NO: 714 - DNA, 22 bp, Artificial Sequence
  Description of Artificial Sequence: Synthetic probe
ggaaggataggacagggtgggc

SEQ ID NO: 715 - DNA, 22 bp, Artificial Sequence
  Description of Artificial Sequence: Synthetic probe
tcctcaggactctgtctgccct

SEQ ID NO: 716 - DNA, 26 bp, Artificial Sequence
  Description of Artificial Sequence: Synthetic probe
tgtgatctcttccagagtctcaaaca

SEQ ID NO: 717 - DNA, 20 bp, Artificial Sequence
  Description of Artificial Sequence: Synthetic probe
actcctccctgggactcctc

SEQ ID NO: 718 - DNA, 21 bp, Artificial Sequence
  Description of Artificial Sequence: Synthetic probe
gaagacgctgaggtcaggcag

SEQ ID NO: 719 - DNA, 22 bp, Artificial Sequence
  Description of Artificial Sequence: Synthetic probe
cactgctgtgtgctggcagatg

SEQ ID NO: 720 - DNA, 20 bp, Artificial Sequence
  Description of Artificial Sequence: Synthetic probe
gactcctccctgggactcct

SEQ ID NO: 721 - DNA, 22 bp, Artificial Sequence
  Description of Artificial Sequence: Synthetic probe
cactgctgtgtgctggcagatg

SEQ ID NO: 722 - DNA, 21 bp, Artificial Sequence
  Description of Artificial Sequence: Synthetic probe
ggcattcctccacgcactcct

SEQ ID NO: 723 - DNA, 20 bp, Artificial Sequence
  Description of Artificial Sequence: Synthetic probe
cctccacccagctctgagcc

SEQ ID NO: 724 - DNA, 22 bp, Artificial Sequence
  Description of Artificial Sequence: Synthetic probe
tgcagaaaagaccgttggactc

SEQ ID NO: 725 - DNA, 22 bp, Artificial Sequence
  Description of Artificial Sequence: Synthetic probe
ggagtgaagggcaatgaagggt

SEQ ID NO: 726 - DNA, 19 bp, Artificial Sequence
  Description of Artificial Sequence: Synthetic probe
gctaggtgtcagcggctcc

SEQ ID NO: 727 - DNA, 22 bp, Artificial Sequence
  Description of Artificial Sequence: Synthetic probe
cctcctagcaggagagggtgga

SEQ ID NO: 728 - DNA, 22 bp, Artificial Sequence
  Description of Artificial Sequence: Synthetic probe
tgccaaaagcgccagatccaag

SEQ ID NO: 729 - DNA, 22 bp, Artificial Sequence
  Description of Artificial Sequence: Synthetic probe
cctcctagcaggagagggtgga

SEQ ID NO: 730 - DNA, 24 bp, Artificial Sequence
  Description of Artificial Sequence: Synthetic probe
tgcataccttggcaatctgcatac

SEQ ID NO: 731 - DNA, 22 bp, Artificial Sequence
  Description of Artificial Sequence: Synthetic probe
cctctgctccttggtccttcac

SEQ ID NO: 732 - DNA, 21 bp, Artificial Sequence
  Description of Artificial Sequence: Synthetic probe
ctgcaaagagcccaggtgcat

SEQ ID NO: 733 - DNA, 19 bp, Artificial Sequence
  Description of Artificial Sequence: Synthetic probe
catggctcctcacccaccc

SEQ ID NO: 734 - DNA, 20 bp, Artificial Sequence
  Description of Artificial Sequence: Synthetic probe
acctcccaccctcctccagg

SEQ ID NO: 735 - DNA, 22 bp, Artificial Sequence
  Description of Artificial Sequence: Synthetic probe
ctcttagccacaggcagggatg

SEQ ID NO: 736 - DNA, 19 bp, Artificial Sequence
  Description of Artificial Sequence: Synthetic probe
acacagtgtgaccgagggc

SEQ ID NO: 737 - DNA, 24 bp, Artificial Sequence
  Description of Artificial Sequence: Synthetic probe
gactcatctctccttcccaccctc

SEQ ID NO: 738 - DNA, 22 bp, Artificial Sequence
  Description of Artificial Sequence: Synthetic probe
ggtatgacacagtcaccgtgga

SEQ ID NO: 739 - DNA, 19 bp, Artificial Sequence
  Description of Artificial Sequence: Synthetic probe
acagtggaccctgggctga

SEQ ID NO: 740 - DNA, 21 bp, Artificial Sequence
  Description of Artificial Sequence: Synthetic probe
ttctgcggacttggccttctg

SEQ ID NO: 741 - DNA, 20 bp, Artificial Sequence
  Description of Artificial Sequence: Synthetic probe
gtgctctcgcgccacttacc

SEQ ID NO: 742 - DNA, 27 bp, Artificial Sequence
  Description of Artificial Sequence: Synthetic probe
gaataaagaggagcaggttgaggaagg

SEQ ID NO: 743 - DNA, 24 bp, Artificial Sequence
  Description of Artificial Sequence: Synthetic probe
atggcaaacttcccatcgtagacc

SEQ ID NO: 744 - DNA, 25 bp, Artificial Sequence
  Description of Artificial Sequence: Synthetic probe
gccctctattgcttagggagcaatg

SEQ ID NO: 745 - DNA, 21 bp, Artificial Sequence
  Description of Artificial Sequence: Synthetic probe
ctctggtttggtgggactggg

SEQ ID NO: 746 - DNA, 21 bp, Artificial Sequence
  Description of Artificial Sequence: Synthetic probe
ccacagtgttgacccaggctt

SEQ ID NO: 747 - DNA, 25 bp, Artificial Sequence
  Description of Artificial Sequence: Synthetic probe
caatttcagaacccaggcaatggaa

SEQ ID NO: 748 - DNA, 25 bp, Artificial Sequence
  Description of Artificial Sequence: Synthetic probe
tcttggtcactatggaaggagagaa

SEQ ID NO: 749 - DNA, 33 bp, Artificial Sequence
  Description of Artificial Sequence: Synthetic probe
ccacaattttgtctaaaatcttggatctactat

SEQ ID NO: 750 - DNA, 20 bp, Artificial Sequence
  Description of Artificial Sequence: Synthetic probe
tgtgtcctgagggcctgagc

SEQ ID NO: 751 - DNA, 33 bp, Artificial Sequence; identical to SEQ ID NO: 749
  Description of Artificial Sequence: Synthetic probe

SEQ ID NO: 752 - DNA, 22 bp, Artificial Sequence
  Description of Artificial Sequence: Synthetic probe
acaaggctcacacatcttgagc

SEQ ID NO: 753 - DNA, 23 bp, Artificial Sequence
  Description of Artificial Sequence: Synthetic probe
aggagggaaggcaggatctctaa

SEQ ID NO: 754 - DNA, 24 bp, Artificial Sequence
  Description of Artificial Sequence: Synthetic probe
ccactcacctgtgatctcccgtac

SEQ ID NO: 755 - DNA, 23 bp, Artificial Sequence
  Description of Artificial Sequence: Synthetic probe
cctgaagatgccatttcctccat

SEQ ID NO: 756 - DNA, 24 bp, Artificial Sequence
  Description of Artificial Sequence: Synthetic probe
atatgggcagggagccttcttctt

SEQ ID NO: 757 - DNA, 24 bp, Artificial Sequence
  Description of Artificial Sequence: Synthetic probe
tgatgtctagtcgctcttccgtag

SEQ ID NO: 758 - DNA, 23 bp, Artificial Sequence
  Description of Artificial Sequence: Synthetic probe
cctcaatcccaccaaggcacatg

SEQ ID NO: 759 - DNA, 26 bp, Artificial Sequence
  Description of Artificial Sequence: Synthetic probe
ctctccttattatcccatcactgacc

SEQ ID NO: 760 - DNA, 22 bp, Artificial Sequence
  Description of Artificial Sequence: Synthetic probe
actgctgtatgagacagtgcct

SEQ ID NO: 761 - DNA, 22 bp, Artificial Sequence
  Description of Artificial Sequence: Synthetic probe
cctcaaccctactcccacgtct

SEQ ID NO: 762 - DNA, 23 bp, Artificial Sequence
  Description of Artificial Sequence: Synthetic probe
ttcggcctcatgggcaaattctc

SEQ ID NO: 763 - DNA, 26 bp, Artificial Sequence
  Description of Artificial Sequence: Synthetic probe
ctctccttattatcccatcactgacc

SEQ ID NO: 764 - DNA, 23 bp, Artificial Sequence
  Description of Artificial Sequence: Synthetic probe
cctcaatcccaccaaggcacatg

SEQ ID NO: 765 - DNA, 26 bp, Artificial Sequence
  Description of Artificial Sequence: Synthetic probe
ctctccttattatcccatcactgacc

SEQ ID NO: 766 - DNA, 24 bp, Artificial Sequence
  Description of Artificial Sequence: Synthetic probe
cccttggagatcctggtgctacta

SEQ ID NO: 767 - DNA, 26 bp, Artificial Sequence
  Description of Artificial Sequence: Synthetic probe
ctctccttattatcccatcactgacc

SEQ ID NO: 768 - DNA, 23 bp, Artificial Sequence
  Description of Artificial Sequence: Synthetic probe
cacctctctcccaactcccaaat

SEQ ID NO: 769 - DNA, 30 bp, Artificial Sequence
  Description of Artificial Sequence: Synthetic probe
gagacttccaggacatgcaaaaaaagaaaa

SEQ ID NO: 770 - DNA, 23 bp, Artificial Sequence
  Description of Artificial Sequence: Synthetic probe
ggatccacactccctgggaagtt

SEQ ID NO: 771 - DNA, 23 bp, Artificial Sequence
  Description of Artificial Sequence: Synthetic probe
aattcctccaggcttctctcacc

SEQ ID NO: 772 - DNA, 23 bp, Artificial Sequence
  Description of Artificial Sequence: Synthetic probe
tcctagcggcatacagaatttcc

SEQ ID NO: 773 - DNA, 23 bp, Artificial Sequence
  Description of Artificial Sequence: Synthetic probe
aattcctccaggcttctctcacc

SEQ ID NO: 774 - DNA, 21 bp, Artificial Sequence
  Description of Artificial Sequence: Synthetic probe
ccgcctccttaccctttgtgt

SEQ ID NO: 775 - DNA, 34 bp, Artificial Sequence
  Description of Artificial Sequence: Synthetic probe
aacacaaaaatctgaagtgcttagagattctaag

SEQ ID NO: 776 - DNA, 30 bp, Artificial Sequence
  Description of Artificial Sequence: Synthetic probe
aaaaagaaaaaaagagaaaatggttgggct

SEQ ID NO: 777 - DNA, 25 bp, Artificial Sequence
  Description of Artificial Sequence: Synthetic probe
ccaggcccactctctctctatatcg

SEQ ID NO: 778 - DNA, 30 bp, Artificial Sequence
  Description of Artificial Sequence: Synthetic probe
taatgtcttccatactactcgtatcaatct

SEQ ID NO: 779 - DNA, 19 bp, Artificial Sequence
  Description of Artificial Sequence: Synthetic probe
agcccagtgtggtggttgc

SEQ ID NO: 780 - DNA, 30 bp, Artificial Sequence; identical to SEQ ID NO: 778
  Description of Artificial Sequence: Synthetic probe

SEQ ID NO: 781 - DNA, 21 bp, Artificial Sequence
  Description of Artificial Sequence: Synthetic probe
aatggtaggcgctatctccgc

SEQ ID NO: 782 - DNA, 20 bp, Artificial Sequence
  Description of Artificial Sequence: Synthetic probe
ggatgaggtggactgtgcct

SEQ ID NO: 783 - DNA, 25 bp, Artificial Sequence
  Description of Artificial Sequence: Synthetic probe
ctgccattaaatgctccctgagtgc

SEQ ID NO: 784 - DNA, 23 bp, Artificial Sequence
  Description of Artificial Sequence: Synthetic probe
cccttcagcacccagactacctg

SEQ ID NO: 785 - DNA, 29 bp, Artificial Sequence
  Description of Artificial Sequence: Synthetic probe
ttccagaaactagaggttagctgatattt

SEQ ID NO: 786 - DNA, 23 bp, Artificial Sequence
  Description of Artificial Sequence: Synthetic probe
gtagcacccagaggtacagtgct

SEQ ID NO: 787 - DNA, 24 bp, Artificial Sequence
  Description of Artificial Sequence: Synthetic probe
atttctaacaacgccttctctcca

SEQ ID NO: 788 - DNA, 33 bp, Artificial Sequence
  Description of Artificial Sequence: Synthetic probe
catattgcctcttattatatccatcattccatt

SEQ ID NO: 789 - DNA, 26 bp, Artificial Sequence
  Description of Artificial Sequence: Synthetic probe
agagcaagaattgactcgaatagggt

SEQ ID NO: 790 - DNA, 27 bp, Artificial Sequence
  Description of Artificial Sequence: Synthetic probe
aagaatcatatttgtgtctgatgggca

SEQ ID NO: 791 - DNA, 32 bp, Artificial Sequence
  Description of Artificial Sequence: Synthetic probe
gttacgaatatagtgacattttcactgtgtaa

SEQ ID NO: 792 - DNA, 29 bp, Artificial Sequence
  Description of Artificial Sequence: Synthetic probe
actactggtatagtgctggtttgttcaac

SEQ ID NO: 793 - DNA, 35 bp, Artificial Sequence
  Description of Artificial Sequence: Synthetic probe
cccaaagactcacatttaggaaatacatatagaaa

SEQ ID NO: 794 - DNA, 26 bp, Artificial Sequence
  Description of Artificial Sequence: Synthetic probe
tttagaaaaatgggaaaacctgggca

SEQ ID NO: 795 - DNA, 30 bp, Artificial Sequence
  Description of Artificial Sequence: Synthetic probe
gagttgaaatcatggtattgcatttttttc

SEQ ID NO: 796 - DNA, 32 bp, Artificial Sequence
  Description of Artificial Sequence: Synthetic probe
ctttgtaagaacttaataggttgagatgtcat

SEQ ID NO: 797 - DNA, 32 bp, Artificial Sequence
  Description of Artificial Sequence: Synthetic probe
ctatcggactgaaagtataaccttcttctttc

SEQ ID NO: 798 - DNA, 31 bp, Artificial Sequence
  Description of Artificial Sequence: Synthetic probe
tcttttctcttcctctgtcttctctctcttc

SEQ ID NO: 799 - DNA, 24 bp, Artificial Sequence
  Description of Artificial Sequence: Synthetic probe
tgcatgtcactgtggatggagaat

SEQ ID NO: 800 - DNA, 28 bp, Artificial Sequence
  Description of Artificial Sequence: Synthetic probe
ttccagaggaaatgacaccacttttctt

SEQ ID NO: 801 - DNA, 26 bp, Artificial Sequence
  Description of Artificial Sequence: Synthetic probe
ctcctcatgtggctgatgttttcaca

SEQ ID NO: 802 - DNA, 32 bp, Artificial Sequence
  Description of Artificial Sequence: Synthetic probe
cctaggaagattttaagttttgacacaatcct

SEQ ID NO: 803 - DNA, 25 bp, Artificial Sequence
  Description of Artificial Sequence: Synthetic probe
gaatgcgtttcatggttccgttttc

SEQ ID NO: 804 - DNA, 32 bp, Artificial Sequence
  Description of Artificial Sequence: Synthetic probe
atcagcactaatactaagacaatgatattctg

SEQ ID NO: 805 - DNA, 31 bp, Artificial Sequence
  Description of Artificial Sequence: Synthetic probe
aatttggctacatctcttcttgattttctag

SEQ ID NO: 806 - DNA, 26 bp, Artificial Sequence
  Description of Artificial Sequence: Synthetic probe
ccctaactctgagtcttgtttctaca

SEQ ID NO: 807 - DNA, 32 bp, Artificial Sequence
  Description of Artificial Sequence: Synthetic probe
ctaaaatatcttgttttgagcttgtttgctga

SEQ ID NO: 808 - DNA, 35 bp, Artificial Sequence
  Description of Artificial Sequence: Synthetic probe
aaatgtccacgtaagtaacagaataagaataacca

SEQ ID NO: 809 - DNA, 32 bp, Artificial Sequence
  Description of Artificial Sequence: Synthetic probe
gcagcgtttcattaacaagtattatgagttta

SEQ ID NO: 810 - DNA, 25 bp, Artificial Sequence
  Description of Artificial Sequence: Synthetic probe
tttctcctggtggcagactttgatc

SEQ ID NO: 811 - DNA, 25 bp, Artificial Sequence
  Description of Artificial Sequence: Synthetic probe
tcctttttcccttttcgtgttctgc

SEQ ID NO: 812 - DNA, 32 bp, Artificial Sequence
  Description of Artificial Sequence: Synthetic probe
gttgattaccttttcatcaacaagcagtttga

SEQ ID NO: 813 - DNA, 32 bp, Artificial Sequence
  Description of Artificial Sequence: Synthetic probe
aattgctacatatacagagtgacaaattcgtt

SEQ ID NO: 814 - DNA, 33 bp, Artificial Sequence
  Description of Artificial Sequence: Synthetic probe
tgcgcatatcatataaaggttatgtaatttcac

SEQ ID NO: 815 - DNA, 23 bp, Artificial Sequence
  Description of Artificial Sequence: Synthetic probe
gtcagcacgggatctgagacttc

SEQ ID NO: 816 - DNA, 29 bp, Artificial Sequence
  Description of Artificial Sequence: Synthetic probe
ctcctttaatgactggttcctcatttttt

SEQ ID NO: 817 - DNA, 23 bp, Artificial Sequence
  Description of Artificial Sequence: Synthetic probe
gctcatcgccgcatcaagagaag

SEQ ID NO: 818 - DNA, 23 bp, Artificial Sequence
  Description of Artificial Sequence: Synthetic probe
cagtcttgctggcctttcttctt

SEQ ID NO: 819 - DNA, 23 bp, Artificial Sequence
  Description of Artificial Sequence: Synthetic probe
ccggctgccctgtatcctgttat

SEQ ID NO: 820 - DNA, 29 bp, Artificial Sequence
  Description of Artificial Sequence: Synthetic probe
aggtttctaattctgattttctcctccag

SEQ ID NO: 821 - DNA, 24 bp, Artificial Sequence
  Description of Artificial Sequence: Synthetic probe
tgaagagactgagacctctcaact

SEQ ID NO: 822 - DNA, 24 bp, Artificial Sequence
  Description of Artificial Sequence: Synthetic probe
cctattgatggcttctgcccttcg

SEQ ID NO: 823 - DNA, 21 bp, Artificial Sequence
  Description of Artificial Sequence: Synthetic probe
tcagatgtcctctgctcaccc

SEQ ID NO: 824 - DNA, 20 bp, Artificial Sequence
  Description of Artificial Sequence: Synthetic probe
tggcaccttccctttcaggc

SEQ ID NO: 825 - DNA, 25 bp, Artificial Sequence
  Description of Artificial Sequence: Synthetic probe
ctctccctttcctctgttctctgca

SEQ ID NO: 826 - DNA, 20 bp, Artificial Sequence
  Description of Artificial Sequence: Synthetic probe
ttctgcccacagcggtttgc

SEQ ID NO: 827 - DNA, 22 bp, Artificial Sequence
  Description of Artificial Sequence: Synthetic probe
aggatcaagggaggagtggctc

SEQ ID NO: 828 - DNA, 22 bp, Artificial Sequence
  Description of Artificial Sequence: Synthetic probe
ttcccgttcatttcccaggtgg

SEQ ID NO: 829 - DNA, 19 bp, Artificial Sequence
  Description of Artificial Sequence: Synthetic probe
tgtcccaccagccacactt

SEQ ID NO: 830 - DNA, 18 bp, Artificial Sequence
  Description of Artificial Sequence: Synthetic probe
gtgccctgaacccaccct

SEQ ID NO: 831 - DNA, 22 bp, Artificial Sequence
  Description of Artificial Sequence: Synthetic probe
aggagtgacctaacttgcgtct

SEQ ID NO: 832 - DNA, 18 bp, Artificial Sequence
  Description of Artificial Sequence: Synthetic probe
gtgccctgaacccaccct

SEQ ID NO: 833 - DNA, 23 bp, Artificial Sequence
  Description of Artificial Sequence: Synthetic probe
gacagagaagggaggaggacctg

SEQ ID NO: 834 - DNA, 20 bp, Artificial Sequence
  Description of Artificial Sequence: Synthetic probe
agttgctgctgcctcgctta

SEQ ID NO: 835 - DNA, 22 bp, Artificial Sequence
  Description of Artificial Sequence: Synthetic probe
agtcctgctgagatccctccca

SEQ ID NO: 836 - DNA, 20 bp, Artificial Sequence
  Description of Artificial Sequence: Synthetic probe
ccctccttgcctgccctctg

SEQ ID NO: 837 - DNA, 34 bp, Artificial Sequence
  Description of Artificial Sequence: Synthetic probe
cactgtgtgaaaccgaatatgtaaattcattcat

SEQ ID NO: 838 - DNA, 21 bp, Artificial Sequence
  Description of Artificial Sequence: Synthetic probe
ctgctggtcctgctcatgctt

SEQ ID NO: 839 - DNA, 19 bp, Artificial Sequence
  Description of Artificial Sequence: Synthetic probe
cagtccctttcccgcctcc

SEQ ID NO: 840 - DNA, 19 bp, Artificial Sequence
  Description of Artificial Sequence: Synthetic probe
gggccaaagggatgccagc

SEQ ID NO: 841 - DNA, 18 bp, Artificial Sequence
  Description of Artificial Sequence: Synthetic probe
tgctgcccgacgaagtgc

SEQ ID NO: 842 - DNA, 20 bp, Artificial Sequence
  Description of Artificial Sequence: Synthetic probe
gccctggtaaccctgctccc

SEQ ID NO: 843 - DNA, 23 bp, Artificial Sequence
  Description of Artificial Sequence: Synthetic probe
cagacaacgtctgcatcgactcc

SEQ ID NO: 844 - DNA, 22 bp, Artificial Sequence
  Description of Artificial Sequence: Synthetic probe
tctgcctgtctgcatctccctg

SEQ ID NO: 845 - DNA, 21 bp, Artificial Sequence
  Description of Artificial Sequence: Synthetic probe
tgtctgggtgctaagatgccc

SEQ ID NO: 846 - DNA, 25 bp, Artificial Sequence
  Description of Artificial Sequence: Synthetic probe
ttggagtaggtgattgaagagcttc

SEQ ID NO: 847 - DNA, 22 bp, Artificial Sequence
  Description of Artificial Sequence: Synthetic probe
cagggactgagtccgcttgtta

SEQ ID NO: 848 - DNA, 21 bp, Artificial Sequence
  Description of Artificial Sequence: Synthetic probe
ctccaatgagcacaagctccc

SEQ ID NO: 849 - DNA, 22 bp, Artificial Sequence
  Description of Artificial Sequence: Synthetic probe
gtttgtgtgcccaaggttctga

SEQ ID NO: 850 - DNA, 19 bp, Artificial Sequence
  Description of Artificial Sequence: Synthetic probe
acgggaactgacccagcag

SEQ ID NO: 851 - DNA, 18 bp, Artificial Sequence
  Description of Artificial Sequence: Synthetic probe
atgagggaggcgggtcga

SEQ ID NO: 852 - DNA, 32 bp, Artificial Sequence
  Description of Artificial Sequence: Synthetic probe
tataaaaggagtatcttttcttctggagacta

SEQ ID NO: 853 - DNA, 19 bp, Artificial Sequence
  Description of Artificial Sequence: Synthetic probe
gctggcttgggctttgcag

SEQ ID NO: 854 - DNA, 28 bp, Artificial Sequence
  Description of Artificial Sequence: Synthetic probe
tctttattgccgtttctcattttttcct

SEQ ID NO: 855 - DNA, 31 bp, Artificial Sequence
  Description of Artificial Sequence: Synthetic probe
tctggatcagttgactttttttttttcctca

SEQ ID NO: 856 - DNA, 30 bp, Artificial Sequence
  Description of Artificial Sequence: Synthetic probe
tttcaagataactgaggcattattctgtgg

SEQ ID NO: 857 - DNA, 32 bp, Artificial Sequence
  Description of Artificial Sequence: Synthetic probe
taattctgctagagaaaggtcttcaaaagttt

SEQ ID NO: 858 - DNA, 21 bp, Artificial Sequence
  Description of Artificial Sequence: Synthetic probe
tgctcccattgtttcctcagc

SEQ ID NO: 859 - DNA, 20 bp, Artificial Sequence
  Description of Artificial Sequence: Synthetic probe
caaaaggtcctgggaggccg

SEQ ID NO: 860 - DNA, 25 bp, Artificial Sequence
  Description of Artificial Sequence: Synthetic probe
gggattgcactcttgtttcttgtag

SEQ ID NO: 861 - DNA, 31 bp, Artificial Sequence
  Description of Artificial Sequence: Synthetic probe
cttagaagatgtaatgtttttgagcacagta

SEQ ID NO: 862 - DNA, 24 bp, Artificial Sequence
  Description of Artificial Sequence: Synthetic probe
acgttcagcacctacctctctcac

SEQ ID NO: 863 - DNA, 22 bp, Artificial Sequence
  Description of Artificial Sequence: Synthetic probe
ggtacctgctggtcagtagacc

SEQ ID NO: 864 - DNA, 29 bp, Artificial Sequence
  Description of Artificial Sequence: Synthetic probe
tgaccagtaatgaatgtgttctgagttag

SEQ ID NO: 865 - DNA, 24 bp, Artificial Sequence
  Description of Artificial Sequence: Synthetic probe
ctgcaaaccagtgacatcaccgag

SEQ ID NO: 866 - DNA, 26 bp, Artificial Sequence
  Description of Artificial Sequence: Synthetic probe
cccagtagtctctgcaactcatgttt

SEQ ID NO: 867 - DNA, 26 bp, Artificial Sequence
  Description of Artificial Sequence: Synthetic probe
gcttacttctgtgttggtatcttgca

SEQ ID NO: 868 - DNA, 24 bp, Artificial Sequence
  Description of Artificial Sequence: Synthetic probe
tcatcttctctctgctgctgtagc

SEQ ID NO: 869 - DNA, 21 bp, Artificial Sequence
  Description of Artificial Sequence: Synthetic probe
ccaacgcggcgttaaggatac

SEQ ID NO: 870 - DNA, 31 bp, Artificial Sequence
  Description of Artificial Sequence: Synthetic probe
tgacacttactaaaaactatacgacacttac

SEQ ID NO: 871 - DNA, 35 bp, Artificial Sequence
  Description of Artificial Sequence: Synthetic probe
aaacttcatctctaacacgactataattttcctct

SEQ ID NO: 872 - DNA, 29 bp, Artificial Sequence
  Description of Artificial Sequence: Synthetic probe
tgtgtctgaatgtagcaatgactaaaata

SEQ ID NO: 873 - DNA, 35 bp, Artificial Sequence
  Description of Artificial Sequence: Synthetic probe
atcaggaactttcacagtttgatatacctcattaa

SEQ ID NO: 874 - DNA, 31 bp, Artificial Sequence
  Description of Artificial Sequence: Synthetic probe
aactcttcctgtaaagataaaatcacagcac

SEQ ID NO: 875 - DNA, 30 bp, Artificial Sequence
  Description of Artificial Sequence: Synthetic probe
ttgctgaagttcttaattctaagcatgaat

SEQ ID NO: 876 - DNA, 32 bp, Artificial Sequence
  Description of Artificial Sequence: Synthetic probe
catgttctatatgctggttcagatagttcttt

SEQ ID NO: 877 - DNA, 29 bp, Artificial Sequence
  Description of Artificial Sequence: Synthetic probe
aatcggcaactaggagttaattcattagc

SEQ ID NO: 878 - DNA, 19 bp, Artificial Sequence
  Description of Artificial Sequence: Synthetic probe
ccacgggcctgccttcgat

SEQ ID NO: 879 - DNA, 24 bp, Artificial Sequence
  Description of Artificial Sequence: Synthetic probe
gcccaggtgcgtcactatgtctaa

SEQ ID NO: 880 - DNA, 25 bp, Artificial Sequence
  Description of Artificial Sequence: Synthetic probe
ccgttccagatttctacaaaagcac

SEQ ID NO: 881 - DNA, 25 bp, Artificial Sequence
  Description of Artificial Sequence: Synthetic probe
ttctgagggaggtttggaagtttca

SEQ ID NO: 882 - DNA, 31 bp, Artificial Sequence
  Description of Artificial Sequence: Synthetic probe
caagaagtcgaaacacaatgttacggtatta

SEQ ID NO: 883 - DNA, 27 bp, Artificial Sequence
  Description of Artificial Sequence: Synthetic probe
gtctgaagaaggtggtaaaggaaaccc

SEQ ID NO: 884 - DNA, 28 bp, Artificial Sequence
  Description of Artificial Sequence: Synthetic probe
aggacaaactctgaaggtaaatgtcaga

SEQ ID NO: 885 - DNA, 33 bp, Artificial Sequence
  Description of Artificial Sequence: Synthetic probe
gctgtaaataatagttctatttgcttatttggg

SEQ ID NO: 886 - DNA, 29 bp, Artificial Sequence
  Description of Artificial Sequence: Synthetic probe
caaggtgtttccttctcttttaagaagca

SEQ ID NO: 887 - DNA, 26 bp, Artificial Sequence
  Description of Artificial Sequence: Synthetic probe
aacttaggagaagggtccaccatgat

SEQ ID NO: 888 - DNA, 29 bp, Artificial Sequence
  Description of Artificial Sequence: Synthetic probe
gggtttttccttttgccttatcaagtagc

SEQ ID NO: 889 - DNA, 29 bp, Artificial Sequence
  Description of Artificial Sequence: Synthetic probe
cgtctttgcgacaaattcattacaaatgg

SEQ ID NO: 890 - DNA, 20 bp, Artificial Sequence
  Description of Artificial Sequence: Synthetic probe
ttcatcgctttccaggccca

SEQ ID NO: 891 - DNA, 24 bp, Artificial Sequence
  Description of Artificial Sequence: Synthetic probe
gtcttgtgacccttcacagccttt

SEQ ID NO: 892 - DNA, 32 bp, Artificial Sequence
  Description of Artificial Sequence: Synthetic probe
gtctcaaaagcaaacatttaatctactgtgat

SEQ ID NO: 893 - DNA, 33 bp, Artificial Sequence
  Description of Artificial Sequence: Synthetic probe
gcatacagagtgaaatatcactttgctatttct

SEQ ID NO: 894 - DNA, 25 bp, Artificial Sequence
  Description of Artificial Sequence: Synthetic probe
aaacatctgagaccaaagcaaaagc

SEQ ID NO: 895 - DNA, 31 bp, Artificial Sequence
  Description of Artificial Sequence: Synthetic probe
cttctaacatatctgtaaatgatgccacatc

SEQ ID NO: 896 - DNA, 30 bp, Artificial Sequence
  Description of Artificial Sequence: Synthetic probe
gtagagctacacattgttttataccagctt

SEQ ID NO: 897 - DNA, 23 bp, Artificial Sequence
  Description of Artificial Sequence: Synthetic probe
tgggaaggattctcgttgagagg

SEQ ID NO: 898 - DNA, 24 bp, Artificial Sequence
  Description of Artificial Sequence: Synthetic probe
gtgtgctcagtgttgtgtgtctta

SEQ ID NO: 899 - DNA, 25 bp, Artificial Sequence
  Description of Artificial Sequence: Synthetic probe
gcactcactgggaatgtgtatttgc

SEQ ID NO: 900 - DNA, 30 bp, Artificial Sequence
  Description of Artificial Sequence: Synthetic probe
tgatgaactagaagaagatcagtttgggta

SEQ ID NO: 901 - DNA, 24 bp, Artificial Sequence
  Description of Artificial Sequence: Synthetic probe
taggttaaacagcctccttgccta

SEQ ID NO: 902 - DNA, 31 bp, Artificial Sequence
  Description of Artificial Sequence: Synthetic probe
ttgaaattatagtttccttgtttttcccgtc

SEQ ID NO: 903 - DNA, 28 bp, Artificial Sequence
  Description of Artificial Sequence: Synthetic probe
aggtaagaacaaatgcgttccttaaaca

SEQ ID NO: 904 - DNA, 29 bp, Artificial Sequence
  Description of Artificial Sequence: Synthetic probe
tttagggtaggaatggcgattgctaaaag

SEQ ID NO: 905 - DNA, 30 bp, Artificial Sequence
  Description of Artificial Sequence: Synthetic probe
aaaactgactttaccattttattgtggtct

SEQ ID NO: 906 - DNA, 25 bp, Artificial Sequence
  Description of Artificial Sequence: Synthetic probe
tgagcagttgatgactgtatatgct

SEQ ID NO: 907 - DNA, 33 bp, Artificial Sequence
  Description of Artificial Sequence: Synthetic probe
attttctcttttcttgttggtgtttgttgtcat

SEQ ID NO: 908 - DNA, 30 bp, Artificial Sequence
  Description of Artificial Sequence: Synthetic probe
tggaaatgtgatttttattttcatggtagg

SEQ ID NO: 909 - DNA, 25 bp, Artificial Sequence
  Description of Artificial Sequence: Synthetic probe
ggacctgtctggagatggtactgac

SEQ ID NO: 910 - DNA, 26 bp, Artificial Sequence
  Description of Artificial Sequence: Synthetic probe
ctagtgcgaaacgcattgctattgtt

SEQ ID NO: 911 - DNA, 30 bp, Artificial Sequence
  Description of Artificial Sequence: Synthetic probe
tcacttcattgctgttttctgtcttctata

SEQ ID NO: 912 - DNA, 33 bp, Artificial Sequence
  Description of Artificial Sequence: Synthetic probe
gctataaaaatgttatcagagtgcaaaatagac

SEQ ID NO: 913 - DNA, 22 bp, Artificial Sequence
  Description of Artificial Sequence: Synthetic probe
ccgacatcagatccaggcagta

SEQ ID NO: 914 - DNA, 31 bp, Artificial Sequence
  Description of Artificial Sequence: Synthetic probe
tgatcttttgagaaatcagtctgctctaatt

SEQ ID NO: 915 - DNA, 19 bp, Artificial Sequence
  Description of Artificial Sequence: Synthetic probe
tgtacacggcgggcttgct

SEQ ID NO: 916 - DNA, 21 bp, Artificial Sequence
  Description of Artificial Sequence: Synthetic probe
cttctccctccctccctccct

SEQ ID NO: 917 - DNA, 34 bp, Artificial Sequence
  Description of Artificial Sequence: Synthetic probe
ttaggatctgctcataggatcaaaaatagaagtc

SEQ ID NO: 918 - DNA, 22 bp, Artificial Sequence
  Description of Artificial Sequence: Synthetic probe
ccctgggagagatgtacctacc

SEQ ID NO: 919 - DNA, 23 bp, Artificial Sequence
  Description of Artificial Sequence: Synthetic probe
ctctctggcgcttgtgtttcaac

SEQ ID NO: 920 - DNA, 30 bp, Artificial Sequence
  Description of Artificial Sequence: Synthetic probe
ttgaaaagctattgactcttaaaagctgcg

SEQ ID NO: 921 - DNA, 24 bp, Artificial Sequence
  Description of Artificial Sequence: Synthetic probe
cctaagctacagccaggtcactta

SEQ ID NO: 922 - DNA, 34 bp, Artificial Sequence
  Description of Artificial Sequence: Synthetic probe
ataaacatttcatccagcattgagttatcttgtg

SEQ ID NO: 923 - DNA, 28 bp, Artificial Sequence
  Description of Artificial Sequence: Synthetic probe
tgttttctttatgtctctcctgtaggaa

SEQ ID NO: 924 - DNA, 19 bp, Artificial Sequence
  Description of Artificial Sequence: Synthetic probe
tctgaaccgtgtgggagcc

SEQ ID NO: 925 - DNA, 24 bp, Artificial Sequence
  Description of Artificial Sequence: Synthetic probe
agcggacatctccttcctgttgtt

SEQ ID NO: 926 - DNA, 26 bp, Artificial Sequence
  Description of Artificial Sequence: Synthetic probe
acaccagtgtgtctctttgcagttat

SEQ ID NO: 927 - DNA, 29 bp, Artificial Sequence
  Description of Artificial Sequence: Synthetic probe
tgggctgtgcttacttttttctttttaga

SEQ ID NO: 928 - DNA, 31 bp, Artificial Sequence
  Description of Artificial Sequence: Synthetic probe
cacctttatccaaaagaattttctcctgtgt

SEQ ID NO: 929 - DNA, 29 bp, Artificial Sequence
  Description of Artificial Sequence: Synthetic probe
cagtccattttcaccctccttttttgatg

SEQ ID NO: 930 - DNA, 26 bp, Artificial Sequence
  Description of Artificial Sequence: Synthetic probe
tttctgcaagtttttgcatacggtga

SEQ ID NO: 931 - DNA, 28 bp, Artificial Sequence
  Description of Artificial Sequence: Synthetic probe
tcattggcctgcatgatgttatctttac

SEQ ID NO: 932 - DNA, 26 bp, Artificial Sequence
  Description of Artificial Sequence: Synthetic probe
ctctctgttggatttgtagcttcccg

SEQ ID NO: 933 - DNA, 26 bp, Artificial Sequence
  Description of Artificial Sequence: Synthetic probe
ggtttgcctaaataagactgtcctca

SEQ ID NO: 934 - DNA, 29 bp, Artificial Sequence
  Description of Artificial Sequence: Synthetic probe
ttcttgaccagtgcttacatttggttttg

SEQ ID NO: 935 - DNA, 30 bp, Artificial Sequence
  Description of Artificial Sequence: Synthetic probe
ctttgccctgatgttgacatttttcatttc

SEQ ID NO: 936 - DNA, 31 bp, Artificial Sequence
  Description of Artificial Sequence: Synthetic probe
ggaactggaagagtgaaaaagtaagtatttt

SEQ ID NO: 937 - DNA, 31 bp, Artificial Sequence
  Description of Artificial Sequence: Synthetic probe
tttaaatatgactgcttcctacatcgtaagt

SEQ ID NO: 938 - DNA, 34 bp, Artificial Sequence
  Description of Artificial Sequence: Synthetic probe
caaaagtaacacatggaaaccttttagaaactgt

SEQ ID NO: 939 - DNA, 31 bp, Artificial Sequence
  Description of Artificial Sequence: Synthetic probe
cttccattctttttttcctttcatattctcc

SEQ ID NO: 940 - DNA, 26 bp, Artificial Sequence
  Description of Artificial Sequence: Synthetic probe
gcttctcctgtgtgtttctgacattt

SEQ ID NO: 941 - DNA, 32 bp, Artificial Sequence
  Description of Artificial Sequence: Synthetic probe
tcacatttgatacttagagtaaacctgctttt

SEQ ID NO: 942 - DNA, 32 bp, Artificial Sequence
  Description of Artificial Sequence: Synthetic probe
catctctttacaatatgatggctacagcttaa

SEQ ID NO: 943 - DNA, 28 bp, Artificial Sequence
  Description of Artificial Sequence: Synthetic probe
caatgaacaatttctcctttcctctcct

SEQ ID NO: 944 - DNA, 28 bp, Artificial Sequence
  Description of Artificial Sequence: Synthetic probe
tcatattcaggctggttagattagtgat

SEQ ID NO: 945 - DNA, 19 bp, Artificial Sequence
  Description of Artificial Sequence: Synthetic probe
agctttcccgacacccgga

SEQ ID NO: 946 - DNA, 25 bp, Artificial Sequence
  Description of Artificial Sequence: Synthetic probe
gggctagactagagagtatccatct

SEQ ID NO: 947 - DNA, 22 bp, Artificial Sequence
  Description of Artificial Sequence: Synthetic probe
ctctcgcccatcacaggagtac

SEQ ID NO: 948 - DNA, 24 bp, Artificial Sequence
  Description of Artificial Sequence: Synthetic probe
gtgtgcctgtggaggaacttttca

SEQ ID NO: 949 - DNA, 19 bp, Artificial Sequence
  Description of Artificial Sequence: Synthetic probe
cttcccacctgtgccctca

SEQ ID NO: 950 - DNA, 20 bp, Artificial Sequence
  Description of Artificial Sequence: Synthetic probe
caccaacgagctgtaagccc

SEQ ID NO: 951 - DNA, 19 bp, Artificial Sequence
  Description of Artificial Sequence: Synthetic probe
cttcccacctgtgccctca

SEQ ID NO: 952 - DNA, 20 bp, Artificial Sequence
  Description of Artificial Sequence: Synthetic probe
gggcaagagtgggcttgagg

SEQ ID NO: 953 - DNA, 26 bp, Artificial Sequence
  Description of Artificial Sequence: Synthetic probe
gtgtgggatagagagcttctagcact

SEQ ID NO: 954 - DNA, 20 bp, Artificial Sequence
  Description of Artificial Sequence: Synthetic probe
ttccagctccctcacctccc

SEQ ID NO: 955 - DNA, 19 bp, Artificial Sequence
  Description of Artificial Sequence: Synthetic probe
tttcagggccgactgcctg

SEQ ID NO: 956 - DNA, 20 bp, Artificial Sequence
  Description of Artificial Sequence: Synthetic probe
ttccagctccctcacctccc

SEQ ID NO: 957 - DNA, 21 bp, Artificial Sequence
  Description of Artificial Sequence: Synthetic probe
aagccaaacctgctcacctgc

SEQ ID NO: 958 - DNA, 24 bp, Artificial Sequence
  Description of Artificial Sequence: Synthetic probe
cttagcctttatcctgccctcctc

SEQ ID NO: 959 - DNA, 24 bp, Artificial Sequence
  Description of Artificial Sequence: Synthetic probe
cccaacttatgccactctctgttt

SEQ ID NO: 960 - DNA, 22 bp, Artificial Sequence
  Description of Artificial Sequence: Synthetic probe
ccctccttgctctagggtgacc

SEQ ID NO: 961 - DNA, 23 bp, Artificial Sequence
  Description of Artificial Sequence: Synthetic probe
aacaccctgttcgcactgactca

SEQ ID NO: 962 - DNA, 22 bp, Artificial Sequence
  Description of Artificial Sequence: Synthetic probe
tcctgtgcttgtccattttgct

SEQ ID NO: 963 - DNA, 21 bp, Artificial Sequence
  Description of Artificial Sequence: Synthetic probe
atgacaagtgcctcctctccc

SEQ ID NO: 964 - DNA, 26 bp, Artificial Sequence
  Description of Artificial Sequence: Synthetic probe
gcattttcctctggaccctcaatgta

SEQ ID NO: 965 - DNA, 23 bp, Artificial Sequence
  Description of Artificial Sequence: Synthetic probe
cagccgtagctccatattggaca

SEQ ID NO: 966 - DNA, 21 bp, Artificial Sequence
  Description of Artificial Sequence: Synthetic probe
cctaggaggaacctcagtgcc

SEQ ID NO: 967 - DNA, 19 bp, Artificial Sequence
  Description of Artificial Sequence: Synthetic probe
ggaggtggaggtgcaggac

SEQ ID NO: 968 - DNA, 20 bp, Artificial Sequence
  Description of Artificial Sequence: Synthetic probe
cccttggcttcccttcccgg

SEQ ID NO: 969 - DNA, 22 bp, Artificial Sequence
  Description of Artificial Sequence: Synthetic probe
gctctctccacccaaacccttg

SEQ ID NO: 970 - DNA, 26 bp, Artificial Sequence
  Description of Artificial Sequence: Synthetic probe
ctacctagaccctcctaacttttggg

SEQ ID NO: 971 - DNA, 25 bp, Artificial Sequence
  Description of Artificial Sequence: Synthetic probe
cagtgagaagacagcaggcactttc

SEQ ID NO: 972 - DNA, 34 bp, Artificial Sequence
  Description of Artificial Sequence: Synthetic probe
tcagaggagtaaataattggaaaagtaatcagca

SEQ ID NO: 973 - DNA, 33 bp, Artificial Sequence
  Description of Artificial Sequence: Synthetic probe
aagatgaaataaaacgtctctcttcccttcttt

SEQ ID NO: 974 - DNA, 33 bp, Artificial Sequence
  Description of Artificial Sequence: Synthetic probe
gttcctttaactgtagacttggaatctactgat

SEQ ID NO: 975 - DNA, 26 bp, Artificial Sequence
  Description of Artificial Sequence: Synthetic probe
ctgactataaccacgtacccagtgca

SEQ ID NO: 976 - DNA, 25 bp, Artificial Sequence
  Description of Artificial Sequence: Synthetic probe
aatgccgtgctttctccttttgttg

SEQ ID NO: 977 - DNA, 28 bp, Artificial Sequence
  Description of Artificial Sequence: Synthetic probe
gtttttgcattttcctctacatttgcag

SEQ ID NO: 978 - DNA, 29 bp, Artificial Sequence
  Description of Artificial Sequence: Synthetic probe
tctggcggtgttttgaaattagttatttc

SEQ ID NO: 979 - DNA, 24 bp, Artificial Sequence
  Description of Artificial Sequence: Synthetic probe
ggagcttctcttcttcctcaacag

SEQ ID NO: 980 - DNA, 30 bp, Artificial Sequence
  Description of Artificial Sequence: Synthetic probe
tgatttgtgaatatgcctactgttcataga

SEQ ID NO: 981 - DNA, 24 bp, Artificial Sequence
  Description of Artificial Sequence: Synthetic probe
cccatcaccagatgctatgtgcta

SEQ ID NO: 982 - DNA, 24 bp, Artificial Sequence
  Description of Artificial Sequence: Synthetic probe
gccttctcagatggagccaggatt

SEQ ID NO: 983 - DNA, 23 bp, Artificial Sequence
  Description of Artificial Sequence: Synthetic probe
cctcctcctgtgatctgcaatct

SEQ ID NO: 984 - DNA, 23 bp, Artificial Sequence
  Description of Artificial Sequence: Synthetic probe
gccttttcttttgcttcccttgt

SEQ ID NO: 985 - DNA, 26 bp, Artificial Sequence
  Description of Artificial Sequence: Synthetic probe
gaccttcctggttggccgttatattg

SEQ ID NO: 986 - DNA, 23 bp, Artificial Sequence
  Description of Artificial Sequence: Synthetic probe
cctttcttccctctctccaccag

SEQ ID NO: 987 - DNA, 26 bp, Artificial Sequence
  Description of Artificial Sequence: Synthetic probe
tgctaggattgttaaataaccgcctt

SEQ ID NO: 988 - DNA, 32 bp, Artificial Sequence
  Description of Artificial Sequence: Synthetic probe
gtatacattctaatactgttttccaaaacagg

SEQ ID NO: 989 - DNA, 28 bp, Artificial Sequence
  Description of Artificial Sequence: Synthetic probe
ccatggaatatgttcttttgcatacaga

SEQ ID NO: 990 - DNA, 20 bp, Artificial Sequence
  Description of Artificial Sequence: Synthetic probe
ccacgcctagagactccggc

SEQ ID NO: 991 - DNA, 23 bp, Artificial Sequence
  Description of Artificial Sequence: Synthetic probe
cttctctctcccacctttctgca

SEQ ID NO: 992 - DNA, 24 bp, Artificial Sequence
  Description of Artificial Sequence: Synthetic probe
agatgggattaacgtccacatgga

SEQ ID NO: 993 - DNA, 19 bp, Artificial Sequence
  Description of Artificial Sequence: Synthetic probe
ggcctctcccgtgcctagt

SEQ ID NO: 994 - DNA, 19 bp, Artificial Sequence
  Description of Artificial Sequence: Synthetic probe
tgggaggcattcagcacct

SEQ ID NO: 995 - DNA, 21 bp, Artificial Sequence
  Description of Artificial Sequence: Synthetic probe
cctgaaccctggaccctgctc

SEQ ID NO: 996 - DNA, 18 bp, Artificial Sequence
  Description of Artificial Sequence: Synthetic probe
ggtgagtgagcggaggca

SEQ ID NO: 997 - DNA, 22 bp, Artificial Sequence
  Description of Artificial Sequence: Synthetic probe
caaatcctcacgcaacccgcag

SEQ ID NO: 998 - DNA, 18 bp, Artificial Sequence
  Description of Artificial Sequence: Synthetic probe
gccggcatgggacagagt

SEQ ID NO: 999 - DNA, 18 bp, Artificial Sequence
  Description of Artificial Sequence: Synthetic probe
cccagacagtgcggagca

SEQ ID NO: 1000 - DNA, 27 bp, Artificial Sequence
  Description of Artificial Sequence: Synthetic probe
cagctcagaacctggtatctactttct

SEQ ID NO: 1001 - DNA, 19 bp, Artificial Sequence
  Description of Artificial Sequence: Synthetic probe
gccctcagcaccactgacc

SEQ ID NO: 1002 - DNA, 25 bp, Artificial Sequence
  Description of Artificial Sequence: Synthetic probe
tgtgtttcccgatcatcttcatcat

SEQ ID NO: 1003 - DNA, 21 bp, Artificial Sequence
  Description of Artificial Sequence: Synthetic probe
caggcgtcctactggcatgac

SEQ ID NO: 1004 - DNA, 19 bp, Artificial Sequence
  Description of Artificial Sequence: Synthetic probe
ccctgcccaccttctggga

SEQ ID NO: 1005 - DNA, 20 bp, Artificial Sequence
  Description of Artificial Sequence: Synthetic probe
ctctgcccagttcccgcctc

SEQ ID NO: 1006 - DNA, 20 bp, Artificial Sequence
  Description of Artificial Sequence: Synthetic probe
ctgggagggtgtgggaaggc

SEQ ID NO: 1007 - DNA, 19 bp, Artificial Sequence
  Description of Artificial Sequence: Synthetic probe
tgaggacccagtggagggc

SEQ ID NO: 1008 - DNA, 22 bp, Artificial Sequence
  Description of Artificial Sequence: Synthetic probe
actctggtgagtgtagactcgg

SEQ ID NO: 1009 - DNA, 21 bp, Artificial Sequence
  Description of Artificial Sequence: Synthetic probe
ccgccttattcgggaacagcc

SEQ ID NO: 1010 - DNA, 19 bp, Artificial Sequence
  Description of Artificial Sequence: Synthetic probe
cagggtgggctgctaggga

SEQ ID NO: 1011 - DNA, 20 bp, Artificial Sequence
  Description of Artificial Sequence: Synthetic probe
tggtgcccactcttcccacc

SEQ ID NO: 1012 - DNA, 28 bp, Artificial Sequence
  Description of Artificial Sequence: Synthetic probe
gtctcttaccacctgtaatcaaggtgag

SEQ ID NO: 1013 - DNA, 21 bp, Artificial Sequence
  Description of Artificial Sequence: Synthetic probe
cagacggtcttggaacccaga

SEQ ID NO: 1014 - DNA, 20 bp, Artificial Sequence
  Description of Artificial Sequence: Synthetic probe
gagcccaaaatgggtcaggc

SEQ ID NO: 1015 - DNA, 22 bp, Artificial Sequence
  Description of Artificial Sequence: Synthetic probe
cgatgtgcttcagccactggat

SEQ ID NO: 1016 - DNA, 19 bp, Artificial Sequence
  Description of Artificial Sequence: Synthetic probe
tcctggcccttcaggtgct

SEQ ID NO: 1017 - DNA, 19 bp, Artificial Sequence
  Description of Artificial Sequence: Synthetic probe
tgccctcgatacagcccgg

SEQ ID NO: 1018 - DNA, 18 bp, Artificial Sequence
  Description of Artificial Sequence: Synthetic probe
cccacacagctcagcgca

SEQ ID NO: 1019 - DNA, 20 bp, Artificial Sequence
  Description of Artificial Sequence: Synthetic probe
gatgcgcccagtacctgtcg

SEQ ID NO: 1020 - DNA, 22 bp, Artificial Sequence
  Description of Artificial Sequence: Synthetic probe
gttacaggtgtgagccaccaca

SEQ ID NO: 1021 - DNA, 20 bp, Artificial Sequence
  Description of Artificial Sequence: Synthetic probe
cccaccttcctgggtgcaga

SEQ ID NO: 1022 - DNA, 22 bp, Artificial Sequence
  Description of Artificial Sequence: Synthetic probe
ggagctggagagactgagaggg

SEQ ID NO: 1023 - DNA, 20 bp, Artificial Sequence
  Description of Artificial Sequence: Synthetic probe
agagagggcctcagtgcaga

SEQ ID NO: 1024 - DNA, 22 bp, Artificial Sequence
  Description of Artificial Sequence: Synthetic probe
cagaggaggaggaggactggaa

SEQ ID NO: 1025 - DNA, 24 bp, Artificial Sequence
  Description of Artificial Sequence: Synthetic probe
ggtcccagaccaaatctgaaggag

SEQ ID NO: 1026 - DNA, 22 bp, Artificial Sequence
  Description of Artificial Sequence: Synthetic probe
cagaggaggaggaggactggaa

SEQ ID NO: 1027 - DNA, 20 bp, Artificial Sequence
  Description of Artificial Sequence: Synthetic probe
cctcctcagagacggccagc

SEQ ID NO: 1028 - DNA, 21 bp, Artificial Sequence
  Description of Artificial Sequence: Synthetic probe
cctgcacagccttgagccttg

SEQ ID NO: 1029 - DNA, 26 bp, Artificial Sequence
  Description of Artificial Sequence: Synthetic probe
gtaatcagtgttctgtctctttccca

SEQ ID NO: 1030 - DNA, 29 bp, Artificial Sequence
  Description of Artificial Sequence: Synthetic probe
catcttgttccttgttctattgcttttac

SEQ ID NO: 1031 - DNA, 32 bp, Artificial Sequence
  Description of Artificial Sequence: Synthetic probe
caataaacaaatgaagaaatggatgaatggct

SEQ ID NO: 1032 - DNA, 26 bp, Artificial Sequence
  Description of Artificial Sequence: Synthetic probe
attcaccatcttatctcctctgggtt

SEQ ID NO: 1033 - DNA, 29 bp, Artificial Sequence
  Description of Artificial Sequence: Synthetic probe
aaagattgcactccaggataatacacatc

SEQ ID NO: 1034 - DNA, 28 bp, Artificial Sequence
  Description of Artificial Sequence: Synthetic probe
cttagagttttggcaaaagtgaagactg

SEQ ID NO: 1035 - DNA, 33 bp, Artificial Sequence
  Description of Artificial Sequence: Synthetic probe
aatggacaaatggatggtgtgcttttaatttaa

SEQ ID NO: 1036 - DNA, 32 bp, Artificial Sequence
  Description of Artificial Sequence: Synthetic probe
gacttctgaaataacagtttgctttgtgtatg

SEQ ID NO: 1037 - DNA, 33 bp, Artificial Sequence
  Description of Artificial Sequence: Synthetic probe
gagttttacatttttaatgctcctttctttgac

SEQ ID NO: 1038 - DNA, 23 bp, Artificial Sequence
  Description of Artificial Sequence: Synthetic probe
tgcacgtactcaccatttgtctt

SEQ ID NO: 1039 - DNA, 32 bp, Artificial Sequence
  Description of Artificial Sequence: Synthetic probe
tattcctaactgactcatcatttcatctctga

SEQ ID NO: 1040 - DNA, 27 bp, Artificial Sequence
  Description of Artificial Sequence: Synthetic probe
gtttggtaagaatggaatgtgccaaat

SEQ ID NO: 1041 - DNA, 27 bp, Artificial Sequence
  Description of Artificial Sequence: Synthetic probe
ttcatcgctgagtgacactcttttgtt

SEQ ID NO: 1042 - DNA, 24 bp, Artificial Sequence
  Description of Artificial Sequence: Synthetic probe
gtatgaaagccagctacagatggt

SEQ ID NO: 1043 - DNA, 27 bp, Artificial Sequence
  Description of Artificial Sequence: Synthetic probe
ttcatcgctgagtgacactcttttgtt

SEQ ID NO: 1044 - DNA, 29 bp, Artificial Sequence
  Description of Artificial Sequence: Synthetic probe
gatcacagaaggagtctggaatagaaagg

SEQ ID NO: 1045 - DNA, 24 bp, Artificial Sequence
  Description of Artificial Sequence: Synthetic probe
tatgcccagccagtgagcttattt

SEQ ID NO: 1046 - DNA, 24 bp, Artificial Sequence
  Description of Artificial Sequence: Synthetic probe
ttagttgcagcatctcctgtagca

SEQ ID NO: 1047 - DNA, 33 bp, Artificial Sequence
  Description of Artificial Sequence: Synthetic probe
gtttattttatcttctcaatacgtttccctatg

SEQ ID NO: 1048 - DNA, 30 bp, Artificial Sequence
  Description of Artificial Sequence: Synthetic probe
ctactttgagatgagtacctattcaacaaa

SEQ ID NO: 1049 - DNA, 33 bp, Artificial Sequence
  Description of Artificial Sequence: Synthetic probe
caaaaatcactttttttttctcacttgggatgt

SEQ ID NO: 1050 - DNA, 30 bp, Artificial Sequence
  Description of Artificial Sequence: Synthetic probe
aacttgtttagccaaatggtacttcttttc

SEQ ID NO: 1051 - DNA, 32 bp, Artificial Sequence
  Description of Artificial Sequence: Synthetic probe
ttttcataatgacatagaatccttttctgagg

SEQ ID NO: 1052 - DNA, 26 bp, Artificial Sequence
  Description of Artificial Sequence: Synthetic probe
actagttctctttcctgttttgcaga

SEQ ID NO: 1053 - DNA, 27 bp, Artificial Sequence
  Description of Artificial Sequence: Synthetic probe
attcactttgttctatctgcaacgtag

SEQ ID NO: 1054 - DNA, 30 bp, Artificial Sequence
  Description of Artificial Sequence: Synthetic probe
tctttttaaggtgtgcatgtatcaacatta

SEQ ID NO: 1055 - DNA, 20 bp, Artificial Sequence
  Description of Artificial Sequence: Synthetic probe
tcggtgacgcgcatccttaa

SEQ ID NO: 1056 - DNA, 19 bp, Artificial Sequence
  Description of Artificial Sequence: Synthetic probe
gacaggcagggcaggcaca

SEQ ID NO: 1057 - DNA, 20 bp, Artificial Sequence
  Description of Artificial Sequence: Synthetic probe
tcaccaccaagcccacagct

SEQ ID NO: 1058 - DNA, 20 bp, Artificial Sequence
  Description of Artificial Sequence: Synthetic probe
ccttcccgaagggtcccagg

SEQ ID NO: 1059 - DNA, 22 bp, Artificial Sequence
  Description of Artificial Sequence: Synthetic probe
gggcaaatgagcctctcagtgc

SEQ ID NO: 1060 - DNA, 19 bp, Artificial Sequence
  Description of Artificial Sequence: Synthetic probe
ggacccaggcttggcaggt

SEQ ID NO: 1061 - DNA, 20 bp, Artificial Sequence
  Description of Artificial Sequence: Synthetic probe
agctcccggcctgtatgagc

SEQ ID NO: 1062 - DNA, 20 bp, Artificial Sequence
  Description of Artificial Sequence: Synthetic probe
cccgtgtctccatcccgtct

SEQ ID NO: 1063 - DNA, 33 bp, Artificial Sequence
  Description of Artificial Sequence: Synthetic probe
gaatacattagcagattaggtaacaaagtgtcc

SEQ ID NO: 1064 - DNA, 33 bp, Artificial Sequence
  Description of Artificial Sequence: Synthetic probe
agtaatcatgtaattcactccttgttttttctg

SEQ ID NO: 1065 - DNA, 32 bp, Artificial Sequence
  Description of Artificial Sequence: Synthetic probe
tccctaagtttgtaagtagtgctatatttatg

SEQ ID NO: 1066 - DNA, 24 bp, Artificial Sequence
  Description of Artificial Sequence: Synthetic probe
tggtgtcactgacattctcattgt

SEQ ID NO: 1067 - DNA, 32 bp, Artificial Sequence
  Description of Artificial Sequence: Synthetic probe
ttggaaagtaatagggtattaaaactgccttt

SEQ ID NO: 1068 - DNA, 29 bp, Artificial Sequence
  Description of Artificial Sequence: Synthetic probe
ggtctgatgagctgctattgttcatcttt

SEQ ID NO: 1069 - DNA, 20 bp, Artificial Sequence
  Description of Artificial Sequence: Synthetic probe
cagcggaggcactttggaag

SEQ ID NO: 1070 - DNA, 20 bp, Artificial Sequence
  Description of Artificial Sequence: Synthetic probe
gagcggtggtgggcgttaag

SEQ ID NO: 1071 - DNA, 32 bp, Artificial Sequence
  Description of Artificial Sequence: Synthetic probe
aactaacctgaatccatgaaaacaaggagaat

SEQ ID NO: 1072 - DNA, 21 bp, Artificial Sequence
  Description of Artificial Sequence: Synthetic probe
agcctcgaagggcattgcttc

SEQ ID NO: 1073 - DNA, 19 bp, Artificial Sequence
  Description of Artificial Sequence: Synthetic probe
tcttgggatgggctgccga

SEQ ID NO: 1074 - DNA, 22 bp, Artificial Sequence
  Description of Artificial Sequence: Synthetic probe
gggtctgagatggatcttgcgt

SEQ ID NO: 1075 - DNA, 20 bp, Artificial Sequence
  Description of Artificial Sequence: Synthetic probe
gcagagtccgccgcattacc

SEQ ID NO: 1076 - DNA, 20 bp, Artificial Sequence
  Description of Artificial Sequence: Synthetic probe
tgttcccgaggcagcccatg

SEQ ID NO: 1077 - DNA, 18 bp, Artificial Sequence
  Description of Artificial Sequence: Synthetic probe
cacagacagagcccgcga

SEQ ID NO: 1078 - DNA, 32 bp, Artificial Sequence
  Description of Artificial Sequence: Synthetic probe
acttcctaaaggttagtataaagtctgttcct

SEQ ID NO: 1079 - DNA, 29 bp, Artificial Sequence
  Description of Artificial Sequence: Synthetic probe
cagtatgatcttcatgtttgtttggtttg

SEQ ID NO: 1080 - DNA, 18 bp, Artificial Sequence
  Description of Artificial Sequence: Synthetic probe
gcacaaggagccagcacg

SEQ ID NO: 1081 - DNA, 19 bp, Artificial Sequence
  Description of Artificial Sequence: Synthetic probe
cactgtgctcaggtgggcg

SEQ ID NO: 1082 - DNA, 20 bp, Artificial Sequence
  Description of Artificial Sequence: Synthetic probe
atgggttgggtggcggttac

SEQ ID NO: 1083 - DNA, 21 bp, Artificial Sequence
  Description of Artificial Sequence: Synthetic probe
cgctcggcacatagtcagcct

SEQ ID NO: 1084 - DNA, 29 bp, Artificial Sequence
  Description of Artificial Sequence: Synthetic probe
ggtgaatgtcaagaaaccatgatctctgt

SEQ ID NO: 1085 - DNA, 28 bp, Artificial Sequence
  Description of Artificial Sequence: Synthetic probe
caaagccaaccgaaacagtaataattgc

SEQ ID NO: 1086 - DNA, 23 bp, Artificial Sequence
  Description of Artificial Sequence: Synthetic probe
gatgaccatgttgtagctgctgc

SEQ ID NO: 1087 - DNA, 22 bp, Artificial Sequence
  Description of Artificial Sequence: Synthetic probe
agaaccaccgcaatgaacagcc

SEQ ID NO: 1088 - DNA, 21 bp, Artificial Sequence
  Description of Artificial Sequence: Synthetic probe
tacgaacagccaagcccacag

SEQ ID NO: 1089 - DNA, 22 bp, Artificial Sequence
  Description of Artificial Sequence: Synthetic probe
agaaccaccgcaatgaacagcc

SEQ ID NO: 1090 - DNA, 20 bp, Artificial Sequence
  Description of Artificial Sequence: Synthetic probe
acgtcaaacatgctggtggg

SEQ ID NO: 1091 - DNA, 24 bp, Artificial Sequence
  Description of Artificial Sequence: Synthetic probe
gatcttgcttgttgaggaacagga

SEQ ID NO: 1092 - DNA, 27 bp, Artificial Sequence
  Description of Artificial Sequence: Synthetic probe
gaggaggaacaagagaggaaactaaag

SEQ ID NO: 1093 - DNA, 27 bp, Artificial Sequence
  Description of Artificial Sequence: Synthetic probe
ctatggtgggtgattaactgcttgtac

SEQ ID NO: 1094 - DNA, 22 bp, Artificial Sequence
  Description of Artificial Sequence: Synthetic probe
agaaccaccgcaatgaacagcc

SEQ ID NO: 1095 - DNA, 24 bp, Artificial Sequence
  Description of Artificial Sequence: Synthetic probe
tccacactggatgtgcgtgaacta

SEQ ID NO: 1096 - DNA, 27 bp, Artificial Sequence
  Description of Artificial Sequence: Synthetic probe
ctatggtgggtgattaactgcttgtac

SEQ ID NO: 1097 - DNA, 21 bp, Artificial Sequence
  Description of Artificial Sequence: Synthetic probe
ctttgctcagccctgactcga

SEQ ID NO: 1098 - DNA, 20 bp, Artificial Sequence
  Description of Artificial Sequence: Synthetic probe
ctaggctctcctgggagcgg

SEQ ID NO: 1099 - DNA, 20 bp, Artificial Sequence
  Description of Artificial Sequence: Synthetic probe
gggccctcccagggaagatg

SEQ ID NO: 1100 - DNA, 20 bp, Artificial Sequence
  Description of Artificial Sequence: Synthetic probe
aaccagcactgtttcccgcc

SEQ ID NO: 1101 - DNA, 19 bp, Artificial Sequence
  Description of Artificial Sequence: Synthetic probe
tgacgaggttggagcccag

SEQ ID NO: 1102 - DNA, 19 bp, Artificial Sequence
  Description of Artificial Sequence: Synthetic probe
cccaaccctcccaccttcc

SEQ ID NO: 1103 - DNA, 24 bp, Artificial Sequence
  Description of Artificial Sequence: Synthetic probe
cagcttggcttctgtactcagcag

SEQ ID NO: 1104 - DNA, 20 bp, Artificial Sequence
  Description of Artificial Sequence: Synthetic probe
catgagcctcccacccaggt

SEQ ID NO: 1105 - DNA, 24 bp, Artificial Sequence
  Description of Artificial Sequence: Synthetic probe
acctctatcatcatctcctgctgt

SEQ ID NO: 1106 - DNA, 19 bp, Artificial Sequence
  Description of Artificial Sequence: Synthetic probe
agggcgctcaggttggtgg

SEQ ID NO: 1107 - DNA, 20 bp, Artificial Sequence
  Description of Artificial Sequence: Synthetic probe
gcagggacagtaagggaggg

SEQ ID NO: 1108 - DNA, 20 bp, Artificial Sequence
  Description of Artificial Sequence: Synthetic probe
ccaagcaggcagtacaggcc

SEQ ID NO: 1109 - DNA, 20 bp, Artificial Sequence
  Description of Artificial Sequence: Synthetic probe
ccggtccctcctgatcccat

SEQ ID NO: 1110 - DNA, 20 bp, Artificial Sequence
  Description of Artificial Sequence: Synthetic probe
ctcaggacctcgcccgaagc

SEQ ID NO: 1111 - DNA, 20 bp, Artificial Sequence
  Description of Artificial Sequence: Synthetic probe
cctaccggaagcaggtggtc

SEQ ID NO: 1112 - DNA, 21 bp, Artificial Sequence
  Description of Artificial Sequence: Synthetic probe
ggagaccctgtaggaggaccc

SEQ ID NO: 1113 - DNA, 22 bp, Artificial Sequence
  Description of Artificial Sequence: Synthetic probe
ggattcctaccggaagcaggtg

SEQ ID NO: 1114 - DNA, 21 bp, Artificial Sequence
  Description of Artificial Sequence: Synthetic probe
ggagaccctgtaggaggaccc

SEQ ID NO: 1115 - DNA, 27 bp, Artificial Sequence
  Description of Artificial Sequence: Synthetic probe
acctgctaccatatcagagaccaacta

SEQ ID NO: 1116 - DNA, 32 bp, Artificial Sequence
  Description of Artificial Sequence: Synthetic probe
actatgagacatttggaaacctctataactag

SEQ ID NO: 1117 - DNA, 21 bp, Artificial Sequence
  Description of Artificial Sequence: Synthetic probe
tggacccaacgcttcatgctc

SEQ ID NO: 1118 - DNA, 29 bp, Artificial Sequence
  Description of Artificial Sequence: Synthetic probe
ttattctcttttaccttttgtttcccagg

SEQ ID NO: 1119 - DNA, 35 bp, Artificial Sequence
  Description of Artificial Sequence: Synthetic probe
cattacatttattcttctcccttttttcctctcac

SEQ ID NO: 1120 - DNA, 28 bp, Artificial Sequence
  Description of Artificial Sequence: Synthetic probe
attctccttacaattcctgctagggtat

SEQ ID NO: 1121 - DNA, 20 bp, Artificial Sequence
  Description of Artificial Sequence: Synthetic probe
gggtggcacggtcttcagag

SEQ ID NO: 1122 - DNA, 29 bp, Artificial Sequence
  Description of Artificial Sequence: Synthetic probe
atccatttgtctgaaaaactttgcttcta

SEQ ID NO: 1123 - DNA, 33 bp, Artificial Sequence
  Description of Artificial Sequence: Synthetic probe
tgaattgttcttttagtagtcactacgttgttt

SEQ ID NO: 1124 - DNA, 23 bp, Artificial Sequence
  Description of Artificial Sequence: Synthetic probe
ccctgatgtgagtggtgctctct

SEQ ID NO: 1125 - DNA, 21 bp, Artificial Sequence
  Description of Artificial Sequence: Synthetic probe
tgcccagatgctggagaaggt

SEQ ID NO: 1126 - DNA, 20 bp, Artificial Sequence
  Description of Artificial Sequence: Synthetic probe
cctcactagctggctcggct

SEQ ID NO: 1127 - DNA, 22 bp, Artificial Sequence
  Description of Artificial Sequence: Synthetic probe
agacctcatcaggtgagcatgg

SEQ ID NO: 1128 - DNA, 20 bp, Artificial Sequence
  Description of Artificial Sequence: Synthetic probe
gcgaggccctgagagaaagg

SEQ ID NO: 1129 - DNA, 20 bp, Artificial Sequence
  Description of Artificial Sequence: Synthetic probe
cctcactagctggctcggct

SEQ ID NO: 1130 - DNA, 20 bp, Artificial Sequence
  Description of Artificial Sequence: Synthetic probe
gcgaggccctgagagaaagg

SEQ ID NO: 1131 - DNA, 30 bp, Artificial Sequence
  Description of Artificial Sequence: Synthetic probe
gcactataagaccgacttcgacaagaataa

SEQ ID NO: 1132 - DNA, 18 bp, Artificial Sequence
  Description of Artificial Sequence: Synthetic probe
atcgccaggctagggcac

SEQ ID NO: 1133 - DNA, 21 bp, Artificial Sequence
  Description of Artificial Sequence: Synthetic probe
tgcagtacaaggccacagact

SEQ ID NO: 1134 - DNA, 20 bp, Artificial Sequence
  Description of Artificial Sequence: Synthetic probe
ctggttgaaagatggcggct

SEQ ID NO: 1135 - DNA, 23 bp, Artificial Sequence
  Description of Artificial Sequence: Synthetic probe
tgtcatgtccctgagtcactggg

SEQ ID NO: 1136 - DNA, 21 bp, Artificial Sequence
  Description of Artificial Sequence: Synthetic probe
gggcatgatgcgctgtgtgtc

SEQ ID NO: 1137 - DNA, 21 bp, Artificial Sequence
  Description of Artificial Sequence: Synthetic probe
tcgttcgctctccagcttggg

SEQ ID NO: 1138 - DNA, 27 bp, Artificial Sequence
  Description of Artificial Sequence: Synthetic probe
gcatttccagaaatatcaccattctga

SEQ ID NO: 1139 - DNA, 30 bp, Artificial Sequence
  Description of Artificial Sequence: Synthetic probe
gcatgtacctagtattagcatagcataatt

SEQ ID NO: 1140 - DNA, 30 bp, Artificial Sequence
  Description of Artificial Sequence: Synthetic probe
cccattttgccttttagcattaagtgagtt

SEQ ID NO: 1141 - DNA, 33 bp, Artificial Sequence
  Description of Artificial Sequence: Synthetic probe
tcctgattaagtgacttattaaacagcaagata

SEQ ID NO: 1142 - DNA, 32 bp, Artificial Sequence
  Description of Artificial Sequence: Synthetic probe
tataaaatctctactcacacttatgtgtaagg

SEQ ID NO: 1143 - DNA, 31 bp, Artificial Sequence
  Description of Artificial Sequence: Synthetic probe
atatgatagtcttggatctttgctcgaatac

SEQ ID NO: 1144 - DNA, 32 bp, Artificial Sequence
  Description of Artificial Sequence: Synthetic probe
caaagaacaagaacatatcattaaggattacc

SEQ ID NO: 1145 - DNA, 33 bp, Artificial Sequence
  Description of Artificial Sequence: Synthetic probe
gaaaccattattcaatcataaagcaaacttacc

SEQ ID NO: 1146 - DNA, 31 bp, Artificial Sequence
  Description of Artificial Sequence: Synthetic probe
cactctgttaaatcttctttgtaaatacagc

SEQ ID NO: 1147 - DNA, 32 bp, Artificial Sequence
  Description of Artificial Sequence: Synthetic probe
agtgttaccactaataagtgtgacatactaac

SEQ ID NO: 1148 - DNA, 29 bp, Artificial Sequence
  Description of Artificial Sequence: Synthetic probe
ccacataaacaatccatgaccagtaattt

SEQ ID NO: 1149 - DNA, 35 bp, Artificial Sequence
  Description of Artificial Sequence: Synthetic probe
ggacaaaaaagacagtaatgagtatctaatgactt

SEQ ID NO: 1150 - DNA, 32 bp, Artificial Sequence
  Description of Artificial Sequence: Synthetic probe
actacatgaacaatataaagaacatacacacc

SEQ ID NO: 1151 - DNA, 32 bp, Artificial Sequence
  Description of Artificial Sequence: Synthetic probe
agaaaggcattagaaagcctgtagttttactt

SEQ ID NO: 1152 - DNA, 29 bp, Artificial Sequence
  Description of Artificial Sequence: Synthetic probe
actcctgaaccagaatatctgcattaaaa

SEQ ID NO: 1153 - DNA, 33 bp, Artificial Sequence
  Description of Artificial Sequence: Synthetic probe
catccaattacagatttattttttgtttccagg

SEQ ID NO: 1154 - DNA, 25 bp, Artificial Sequence
  Description of Artificial Sequence: Synthetic probe
ctttacaccactgcccaagtaaagc

SEQ ID NO: 1155 - DNA, 33 bp, Artificial Sequence
  Description of Artificial Sequence: Synthetic probe
tatataaacttactctttgagaatccagagcac

SEQ ID NO: 1156 - DNA, 32 bp, Artificial Sequence
  Description of Artificial Sequence: Synthetic probe
gatagaaagctggaaaatcaataagatcattc

SEQ ID NO: 1157 - DNA, 32 bp, Artificial Sequence
  Description of Artificial Sequence: Synthetic probe
aatgttgtagaaagtgaactttagaaacgctc

SEQ ID NO: 1158 - DNA, 28 bp, Artificial Sequence
  Description of Artificial Sequence: Synthetic probe
attacacaggatgccaaacacatacctt

SEQ ID NO: 1159 - DNA, 32 bp, Artificial Sequence
  Description of Artificial Sequence: Synthetic probe
gcttcatctacagcaaataatcaggatattag

SEQ ID NO: 1160 - DNA, 31 bp, Artificial Sequence
  Description of Artificial Sequence: Synthetic probe
aacaacaataaagtttgaagtctgtgctcta

SEQ ID NO: 1161 - DNA, 32 bp, Artificial Sequence
  Description of Artificial Sequence: Synthetic probe
aaaactgaaagtaaataaaaagcacactgacc

SEQ ID NO: 1162 - DNA, 23 bp, Artificial Sequence
  Description of Artificial Sequence: Synthetic probe
gggcatccatctggtcttggtaa

SEQ ID NO: 1163 - DNA, 34 bp, Artificial Sequence
  Description of Artificial Sequence: Synthetic probe
ttgttctgtaaatctactttggtctcagaatgaa

SEQ ID NO: 1164 - DNA, 23 bp, Artificial Sequence
  Description of Artificial Sequence: Synthetic probe
gggagttgtgtcctttggactgc

SEQ ID NO: 1165 - DNA, 19 bp, Artificial Sequence
  Description of Artificial Sequence: Synthetic probe
tccacccacggaggctcct

SEQ ID NO: 1166 - DNA, 25 bp, Artificial Sequence
  Description of Artificial Sequence: Synthetic probe
cctcttcctgtcctttctacaccct

SEQ ID NO: 1167 - DNA, 19 bp, Artificial Sequence
  Description of Artificial Sequence: Synthetic probe
tggccgcccgaaacatcct

SEQ ID NO: 1168 - DNA, 23 bp, Artificial Sequence
  Description of Artificial Sequence: Synthetic probe
tgtgacagatcctgccttctcca

SEQ ID NO: 1169 - DNA, 20 bp, Artificial Sequence
  Description of Artificial Sequence: Synthetic probe
atgacccgctaggcgacaat

SEQ ID NO: 1170 - DNA, 19 bp, Artificial Sequence
  Description of Artificial Sequence: Synthetic probe
agaggcgctgcttaccact

SEQ ID NO: 1171 - DNA, 21 bp, Artificial Sequence
  Description of Artificial Sequence: Synthetic probe
aagggcagactgacatccagt

SEQ ID NO: 1172 - DNA, 30 bp, Artificial Sequence
  Description of Artificial Sequence: Synthetic probe
gtttgccaaacagactcttcattcatcaaa

SEQ ID NO: 1173 - DNA, 19 bp, Artificial Sequence
  Description of Artificial Sequence: Synthetic probe
gcctctccctgctgccaac

SEQ ID NO: 1174 - DNA, 28 bp, Artificial Sequence
  Description of Artificial Sequence: Synthetic probe
aaatttgggattattggagtggaagaaa

SEQ ID NO: 1175 - DNA, 23 bp, Artificial Sequence
  Description of Artificial Sequence: Synthetic probe
cattcagcatgagaacctgggcc

SEQ ID NO: 1176 - DNA, 24 bp, Artificial Sequence
  Description of Artificial Sequence: Synthetic probe
tctggtttttctccctcatcctct

SEQ ID NO: 1177 - DNA, 22 bp, Artificial Sequence
  Description of Artificial Sequence: Synthetic probe
gagagtgtctgtcgctcagtcc

SEQ ID NO: 1178 - DNA, 27 bp, Artificial Sequence
  Description of Artificial Sequence: Synthetic probe
ctgtcttcttctatctctgactcctcc

SEQ ID NO: 1179 - DNA, 20 bp, Artificial Sequence
  Description of Artificial Sequence: Synthetic probe
ggacggctacttccggctga

SEQ ID NO: 1180 - DNA, 18 bp, Artificial Sequence
  Description of Artificial Sequence: Synthetic probe
atgggcgtggtttggcgg

SEQ ID NO: 1181 - DNA, 19 bp, Artificial Sequence
  Description of Artificial Sequence: Synthetic probe
tcatggacctggagcggct

SEQ ID NO: 1182 - DNA, 22 bp, Artificial Sequence
  Description of Artificial Sequence: Synthetic probe
taaagcctgggtttgtgtgtgt

SEQ ID NO: 1183 - DNA, 19 bp, Artificial Sequence
  Description of Artificial Sequence: Synthetic probe
gctgatgctccctgtggcg

SEQ ID NO: 1184 - DNA, 26 bp, Artificial Sequence
  Description of Artificial Sequence: Synthetic probe
cccaccataatgtcactcctactgag

SEQ ID NO: 1185 - DNA, 22 bp, Artificial Sequence
  Description of Artificial Sequence: Synthetic probe
actcaggagggagctgatggga

SEQ ID NO: 1186 - DNA, 21 bp, Artificial Sequence
  Description of Artificial Sequence: Synthetic probe
gggctttttctctctgtgccc

SEQ ID NO: 1187 - DNA, 25 bp, Artificial Sequence
  Description of Artificial Sequence: Synthetic probe
ttgtcttctctctgccaactccttt

SEQ ID NO: 1188 - DNA, 27 bp, Artificial Sequence
  Description of Artificial Sequence: Synthetic probe
atatgctcaattaactgtgccatctca

SEQ ID NO: 1189 - DNA, 30 bp, Artificial Sequence
  Description of Artificial Sequence: Synthetic probe
ctgcagtcaaatataccaccactaaaatat

SEQ ID NO: 1190 - DNA, 28 bp, Artificial Sequence
  Description of Artificial Sequence: Synthetic probe
aactgaagccataacaacagtcttctgt

SEQ ID NO: 1191 - DNA, 30 bp, Artificial Sequence
  Description of Artificial Sequence: Synthetic probe
cagcattcaggaagaaagaggcatttaatg

SEQ ID NO: 1192 - DNA, 30 bp, Artificial Sequence
  Description of Artificial Sequence: Synthetic probe
tccctgttttattctaggtgcttctccata

SEQ ID NO: 1193 - DNA, 30 bp, Artificial Sequence
  Description of Artificial Sequence: Synthetic probe
cttcagatatttgctaatttgggttctgaa

SEQ ID NO: 1194 - DNA, 25 bp, Artificial Sequence
  Description of Artificial Sequence: Synthetic probe
cctgtacttcatgtctatcaggcaa

SEQ ID NO: 1195 - DNA, 26 bp, Artificial Sequence
  Description of Artificial Sequence: Synthetic probe
gccgagacctaatgcacacatgattc

SEQ ID NO: 1196 - DNA, 30 bp, Artificial Sequence; identical to SEQ ID NO: 1193
  Description of Artificial Sequence: Synthetic probe

SEQ ID NO: 1197 - DNA, 26 bp, Artificial Sequence
  Description of Artificial Sequence: Synthetic probe
gccgagacctaatgcacacatgattc

SEQ ID NO: 1198 - DNA, 35 bp, Artificial Sequence
  Description of Artificial Sequence: Synthetic probe
tagaaacatcacactaactcatggaaatactgatc

SEQ ID NO: 1199 - DNA, 29 bp, Artificial Sequence
  Description of Artificial Sequence: Synthetic probe
aaggagtttgtttgttcctttgctttttt

SEQ ID NO: 1200 - DNA, 35 bp, Artificial Sequence
  Description of Artificial Sequence: Synthetic probe
catcactatattaaacgcttagtgaggaatatgag

SEQ ID NO: 1201 - DNA, 33 bp, Artificial Sequence
  Description of Artificial Sequence: Synthetic probe
ccatacctatgatttccctctttgtactgtatt

SEQ ID NO: 1202 - DNA, 27 bp, Artificial Sequence
  Description of Artificial Sequence: Synthetic probe
gtctgttttcttgttgctgttgttgtt

SEQ ID NO: 1203 - DNA, 26 bp, Artificial Sequence
  Description of Artificial Sequence: Synthetic probe
caacagccaaacaacagtgtgtttat

SEQ ID NO: 1204 - DNA, 32 bp, Artificial Sequence
  Description of Artificial Sequence: Synthetic probe
caaaaagtataagtttccaactgttgatactc

SEQ ID NO: 1205 - DNA, 32 bp, Artificial Sequence
  Description of Artificial Sequence: Synthetic probe
cagactacatcatcataaatgagaatgatcgt

SEQ ID NO: 1206 - DNA, 34 bp, Artificial Sequence
  Description of Artificial Sequence: Synthetic probe
gtttgctgataccagaaccatttcaaaagttata

SEQ ID NO: 1207 - DNA, 29 bp, Artificial Sequence
  Description of Artificial Sequence: Synthetic probe
gccaccatgttctctaatagcacaaatga

SEQ ID NO: 1208 - DNA, 32 bp, Artificial Sequence
  Description of Artificial Sequence: Synthetic probe
tgagctgtaccaagttaaatcaccattcaata

SEQ ID NO: 1209 - DNA, 24 bp, Artificial Sequence
  Description of Artificial Sequence: Synthetic probe
atggcctgggatttgttttttccc

SEQ ID NO: 1210 - DNA, 33 bp, Artificial Sequence
  Description of Artificial Sequence: Synthetic probe
atcataatatgcgctgttatctctttcttatag

SEQ ID NO: 1211 - DNA, 30 bp, Artificial Sequence
  Description of Artificial Sequence: Synthetic probe
caattcaaaagttgtttttcccatcttcag

SEQ ID NO: 1212 - DNA, 25 bp, Artificial Sequence
  Description of Artificial Sequence: Synthetic probe
agtccaatcacacaattaaagcggg

SEQ ID NO: 1213 - DNA, 33 bp, Artificial Sequence
  Description of Artificial Sequence: Synthetic probe
ctaaatcaaatgaccatttacagtaagttgacc

SEQ ID NO: 1214 - DNA, 28 bp, Artificial Sequence
  Description of Artificial Sequence: Synthetic probe
ttatatgctgtgctttggaagttcagtc

SEQ ID NO: 1215 - DNA, 33 bp, Artificial Sequence
  Description of Artificial Sequence: Synthetic probe
ctctctcatgttctgttttttcaatttacttgc

SEQ ID NO: 1216 - DNA, 30 bp, Artificial Sequence
  Description of Artificial Sequence: Synthetic probe
tgtctttttattacccagagatacccagaa

SEQ ID NO: 1217 - DNA, 35 bp, Artificial Sequence
  Description of Artificial Sequence: Synthetic probe
ggaacctgaaaaatgaccaacttttctagtaaata

SEQ ID NO: 1218 - DNA, 24 bp, Artificial Sequence
  Description of Artificial Sequence: Synthetic probe
tagaaatagcctcacagtctggca

SEQ ID NO: 1219 - DNA, 29 bp, Artificial Sequence
  Description of Artificial Sequence: Synthetic probe
ggaaggtgtttcctattaggtctaactca

SEQ ID NO: 1220 - DNA, 21 bp, Artificial Sequence
  Description of Artificial Sequence: Synthetic probe
agaaagaaccggctcccgagt

SEQ ID NO: 1221 - DNA, 20 bp, Artificial Sequence
  Description of Artificial Sequence: Synthetic probe
cacaggcttcgccgagtagt

SEQ ID NO: 1222 - DNA, 21 bp, Artificial Sequence
  Description of Artificial Sequence: Synthetic probe
agcctaatctcgtcgcccacg

SEQ ID NO: 1223 - DNA, 28 bp, Artificial Sequence
  Description of Artificial Sequence: Synthetic probe
attaaattcttgaaagcacagcactgca

SEQ ID NO: 1224 - DNA, 20 bp, Artificial Sequence
  Description of Artificial Sequence: Synthetic probe
ctgtgagaggacagcggacc

SEQ ID NO: 1225 - DNA, 34 bp, Artificial Sequence
  Description of Artificial Sequence: Synthetic probe
agaagtcttctttagataagtgagttctcaactc

SEQ ID NO: 1226 - DNA, 32 bp, Artificial Sequence
  Description of Artificial Sequence: Synthetic probe
gaaagagaaaacttatcatctcccacagagac

SEQ ID NO: 1227 - DNA, 33 bp, Artificial Sequence
  Description of Artificial Sequence: Synthetic probe
tgtctaataatttcttctttcactactgccagt

SEQ ID NO: 1228 - DNA, 23 bp, Artificial Sequence
  Description of Artificial Sequence: Synthetic probe
cagggcaaggtccatttcttacc

SEQ ID NO: 1229 - DNA, 29 bp, Artificial Sequence
  Description of Artificial Sequence: Synthetic probe
attaaaaggagcccttcatgttacttact

SEQ ID NO: 1230 - DNA, 26 bp, Artificial Sequence
  Description of Artificial Sequence: Synthetic probe
gcagtgccaaaaataatcatctcacc

SEQ ID NO: 1231 - DNA, 28 bp, Artificial Sequence
  Description of Artificial Sequence: Synthetic probe
tcatgactgatatggtagacagagccta

SEQ ID NO: 1232 - DNA, 24 bp, Artificial Sequence
  Description of Artificial Sequence: Synthetic probe
tcctcaacaaccttccactgtact

SEQ ID NO: 1233 - DNA, 24 bp, Artificial Sequence
  Description of Artificial Sequence: Synthetic probe
aaaaagcacaactggcaaactgat

SEQ ID NO: 1234 - DNA, 30 bp, Artificial Sequence
  Description of Artificial Sequence: Synthetic probe
agaaaactcattgtttcaggtggaacaaaa

SEQ ID NO: 1235 - DNA, 21 bp, Artificial Sequence
  Description of Artificial Sequence: Synthetic probe
cagcttggacacggctttacc

SEQ ID NO: 1236 - DNA, 23 bp, Artificial Sequence
  Description of Artificial Sequence: Synthetic probe
gcttgagcatctttacagcgaca

SEQ ID NO: 1237 - DNA, 21 bp, Artificial Sequence
  Description of Artificial Sequence: Synthetic probe
cagcttggacacggctttacc

SEQ ID NO: 1238 - DNA, 28 bp, Artificial Sequence
  Description of Artificial Sequence: Synthetic probe
tgcctgtcaacagctaactatttatgta

SEQ ID NO: 1239 - DNA, 34 bp, Artificial Sequence
  Description of Artificial Sequence: Synthetic probe
atatacatactctctgtaaagttactcttggttg

SEQ ID NO: 1240 - DNA, 29 bp, Artificial Sequence
  Description of Artificial Sequence: Synthetic probe
acaaaactctttagagaatcactcccact

SEQ ID NO: 1241 - DNA, 33 bp, Artificial Sequence
  Description of Artificial Sequence: Synthetic probe
actattaggttggaggagaaaagaaaaccattt

SEQ ID NO: 1242 - DNA, 28 bp, Artificial Sequence
  Description of Artificial Sequence: Synthetic probe
tgaaactaaaaatcctttgcaggactgt

SEQ ID NO: 1243 - DNA, 26 bp, Artificial Sequence
  Description of Artificial Sequence: Synthetic probe
aagagaacagctcccaaagaaaaatc

SEQ ID NO: 1244 - DNA, 28 bp, Artificial Sequence
  Description of Artificial Sequence: Synthetic probe
aagggaaaacgtgacctaaaggaaaaat

SEQ ID NO: 1245 - DNA, 20 bp, Artificial Sequence
  Description of Artificial Sequence: Synthetic probe
aggacacacctggaactggg

SEQ ID NO: 1246 - DNA, 27 bp, Artificial Sequence
  Description of Artificial Sequence: Synthetic probe
aaccatcatggaagccaaaagaagaga

SEQ ID NO: 1247 - DNA, 31 bp, Artificial Sequence
  Description of Artificial Sequence: Synthetic probe
gaagaaaaagaagtcaaagacaaagtgtgta

SEQ ID NO: 1248 - DNA, 34 bp, Artificial Sequence
  Description of Artificial Sequence: Synthetic probe
gcctgaagagaaacataaagaatcctttcttaat

SEQ ID NO: 1249 - DNA, 29 bp, Artificial Sequence
  Description of Artificial Sequence: Synthetic probe
gctttcccagtaaattactcttaccaatg

SEQ ID NO: 1250 - DNA, 34 bp, Artificial Sequence
  Description of Artificial Sequence: Synthetic probe
ggacaggttttgaaagatatttgtgttactaatg

SEQ ID NO: 1251 - DNA, 30 bp, Artificial Sequence
  Description of Artificial Sequence: Synthetic probe
gtaataatccagactgtgtttctcccttct

SEQ ID NO: 1252 - DNA, 35 bp, Artificial Sequence
  Description of Artificial Sequence: Synthetic probe
tggagtatttgatagtgtattaaccttatgtgtga

SEQ ID NO: 1253 - DNA, 18 bp, Artificial Sequence
  Description of Artificial Sequence: Synthetic probe
accagatcggagcctggc

SEQ ID NO: 1254 - DNA, 33 bp, Artificial Sequence
  Description of Artificial Sequence: Synthetic probe
tctaagtaccctgagaaataatccaattacctg

SEQ ID NO: 1255 - DNA, 23 bp, Artificial Sequence
  Description of Artificial Sequence: Synthetic probe
aggctgagagggtgtcacatacc

SEQ ID NO: 1256 - DNA, 32 bp, Artificial Sequence
  Description of Artificial Sequence: Synthetic probe
gaggaacttagaagaaaaacttcataacatac

SEQ ID NO: 1257 - DNA, 33 bp, Artificial Sequence
  Description of Artificial Sequence: Synthetic probe
gaagcaacagcctttggattatatctaaaattc

SEQ ID NO: 1258 - DNA, 21 bp, Artificial Sequence
  Description of Artificial Sequence: Synthetic probe
ggctcctctccctgaccgtac

SEQ ID NO: 1259 - DNA, 21 bp, Artificial Sequence
  Description of Artificial Sequence: Synthetic probe
gggacacaccaggctactcac

SEQ ID NO: 1260 - DNA, 22 bp, Artificial Sequence
  Description of Artificial Sequence: Synthetic probe
tccaaggtgaaggaaaccaggc

SEQ ID NO: 1261 - DNA, 23 bp, Artificial Sequence
  Description of Artificial Sequence: Synthetic probe
gcttccagagaacaaggagccaa

SEQ ID NO: 1262 - DNA, 35 bp, Artificial Sequence
  Description of Artificial Sequence: Synthetic probe
aagaacaaatgaataaacaggtactgtaagaatcc

SEQ ID NO: 1263 - DNA, 23 bp, Artificial Sequence
  Description of Artificial Sequence: Synthetic probe
ctcgctctttgttgcttcccaaa

SEQ ID NO: 1264 - DNA, 20 bp, Artificial Sequence
  Description of Artificial Sequence: Synthetic probe
ctactgtgactccaggcccg

SEQ ID NO: 1265 - DNA, 21 bp, Artificial Sequence
  Description of Artificial Sequence: Synthetic probe
cctgtcttgtctcctccaccg

SEQ ID NO: 1266 - DNA, 22 bp, Artificial Sequence
  Description of Artificial Sequence: Synthetic probe
ccaccctctgttctcctccaca

SEQ ID NO: 1267 - DNA, 22 bp, Artificial Sequence
  Description of Artificial Sequence: Synthetic probe
tcacctccatctctctccctgt

SEQ ID NO: 1268 - DNA, 22 bp, Artificial Sequence
  Description of Artificial Sequence: Synthetic probe
cctctgggctctttcctccctg

SEQ ID NO: 1269 - DNA, 22 bp, Artificial Sequence
  Description of Artificial Sequence: Synthetic probe
cctccaacatcctcgtgaactc

SEQ ID NO: 1270 - DNA, 19 bp, Artificial Sequence
  Description of Artificial Sequence: Synthetic probe
aggagctaagccctggtgg

SEQ ID NO: 1271 - DNA, 20 bp, Artificial Sequence
  Description of Artificial Sequence: Synthetic probe
gcctgcactcactccttgtg

SEQ ID NO: 1272 - DNA, 20 bp, Artificial Sequence
  Description of Artificial Sequence: Synthetic probe
ttcatcccgttttcgggcac

SEQ ID NO: 1273 - DNA, 22 bp, Artificial Sequence
  Description of Artificial Sequence: Synthetic probe
tggtcaccaaagtccagcacag

SEQ ID NO: 1274 - DNA, 22 bp, Artificial Sequence
  Description of Artificial Sequence: Synthetic probe
gcaaacggccagatggagtctc

SEQ ID NO: 1275 - DNA, 20 bp, Artificial Sequence
  Description of Artificial Sequence: Synthetic probe
gcctccgagtgagtgggcag

SEQ ID NO: 1276 - DNA, 18 bp, Artificial Sequence
  Description of Artificial Sequence: Synthetic probe
agccttcttcgggcctcg

SEQ ID NO: 1277 - DNA, 32 bp, Artificial Sequence
  Description of Artificial Sequence: Synthetic probe
ccttacccataacaactttgactgttaaatgt

SEQ ID NO: 1278 - DNA, 25 bp, Artificial Sequence
  Description of Artificial Sequence: Synthetic probe
tctgctctcactactgcaaaacctt

SEQ ID NO: 1279 - DNA, 27 bp, Artificial Sequence
  Description of Artificial Sequence: Synthetic probe
agttgatggtgtgtagtcatttacctt

SEQ ID NO: 1280 - DNA, 31 bp, Artificial Sequence
  Description of Artificial Sequence: Synthetic probe
ccagataccattttcagtcttttctctcttt

SEQ ID NO: 1281 - DNA, 32 bp, Artificial Sequence
  Description of Artificial Sequence: Synthetic probe
tgaaaggttagaatttctaagaagttatcctg

SEQ ID NO: 1282 - DNA, 27 bp, Artificial Sequence
  Description of Artificial Sequence: Synthetic probe
gtgttttaccttaacctgtgcaaacag

SEQ ID NO: 1283 - DNA, 31 bp, Artificial Sequence
  Description of Artificial Sequence: Synthetic probe
gtttttaatgccatctctctctctctttttt

SEQ ID NO: 1284 - DNA, 19 bp, Artificial Sequence
  Description of Artificial Sequence: Synthetic probe
gggcgacaagagctgagcg

SEQ ID NO: 1285 - DNA, 21 bp, Artificial Sequence
  Description of Artificial Sequence: Synthetic probe
acaggcccagtcttgtactca

SEQ ID NO: 1286 - DNA, 25 bp, Artificial Sequence
  Description of Artificial Sequence: Synthetic probe
caaaggcatggacatacttaatggg

SEQ ID NO: 1287 - DNA, 35 bp, Artificial Sequence
  Description of Artificial Sequence: Synthetic probe
gagactgatacttatttctaatttatacctcacag

SEQ ID NO: 1288 - DNA, 26 bp, Artificial Sequence
  Description of Artificial Sequence: Synthetic probe
acaataccagatagaacagacacagc

SEQ ID NO: 1289 - DNA, 24 bp, Artificial Sequence
  Description of Artificial Sequence: Synthetic probe
aaccacgtctatggaaattccctg

SEQ ID NO: 1290 - DNA, 26 bp, Artificial Sequence
  Description of Artificial Sequence: Synthetic probe
acaaaaaacaaaccaaaccaaaccaa

SEQ ID NO: 1291 - DNA, 28 bp, Artificial Sequence
  Description of Artificial Sequence: Synthetic probe
aaaacaaaacctattttccaagcacacc

SEQ ID NO: 1292 - DNA, 23 bp, Artificial Sequence
  Description of Artificial Sequence: Synthetic probe
tactgtattgtgttgtcccgtgg

SEQ ID NO: 1293 - DNA, 35 bp, Artificial Sequence
  Description of Artificial Sequence: Synthetic probe
cacacaaaacaatctgcttaatttttaaggtacag

SEQ ID NO: 1294 - DNA, 34 bp, Artificial Sequence
  Description of Artificial Sequence: Synthetic probe
tcttgactattctacagcaaaatcatccttgtat

SEQ ID NO: 1295 - DNA, 24 bp, Artificial Sequence
  Description of Artificial Sequence: Synthetic probe
atggttagaggcaaagatgcagag

SEQ ID NO: 1296 - DNA, 31 bp, Artificial Sequence
  Description of Artificial Sequence: Synthetic probe
taagtttgagctgatgatttaagacagtgtt

SEQ ID NO: 1297 - DNA, 24 bp, Artificial Sequence
  Description of Artificial Sequence: Synthetic probe
atgagaggaatgcaggaatcccac

SEQ ID NO: 1298 - DNA, 25 bp, Artificial Sequence
  Description of Artificial Sequence: Synthetic probe
ctttctctttttcagccacaggaaa

SEQ ID NO: 1299 - DNA, 27 bp, Artificial Sequence
  Description of Artificial Sequence: Synthetic probe
aatgtcacaacccactgaggtatatgt

SEQ ID NO: 1300 - DNA, 30 bp, Artificial Sequence
  Description of Artificial Sequence: Synthetic probe
aaatcgtatttaacaaaaagctgagtggaa

SEQ ID NO: 1301 - DNA, 30 bp, Artificial Sequence
  Description of Artificial Sequence: Synthetic probe
gcccataatttcagtggtagctgatttttc

SEQ ID NO: 1302 - DNA, 22 bp, Artificial Sequence
  Description of Artificial Sequence: Synthetic probe
tgaagggatggctggcttacag

SEQ ID NO: 1303 - DNA, 27 bp, Artificial Sequence
  Description of Artificial Sequence: Synthetic probe
agattcctccttgtcacttaatttgga

SEQ ID NO: 1304 - DNA, 35 bp, Artificial Sequence
  Description of Artificial Sequence: Synthetic probe
aaagtaaaagaggagaaactcagagataaccaata

SEQ ID NO: 1305 - DNA, 30 bp, Artificial Sequence
  Description of Artificial Sequence: Synthetic probe
gcatttctgtaaaagtaaagaacgtaagag

SEQ ID NO: 1306 - DNA, 27 bp, Artificial Sequence
  Description of Artificial Sequence: Synthetic probe
aaaaaccattggacaaagtgtggactg

SEQ ID NO: 1307 - DNA, 19 bp, Artificial Sequence
  Description of Artificial Sequence: Synthetic probe
ggctcgactccctccgtac

SEQ ID NO: 1308 - DNA, 29 bp, Artificial Sequence
  Description of Artificial Sequence: Synthetic probe
catcctgctactttgaggttttacttacc

SEQ ID NO: 1309 - DNA, 26 bp, Artificial Sequence
  Description of Artificial Sequence: Synthetic probe
aaatgacagacaatgtcatcacagga

SEQ ID NO: 1310 - DNA, 30 bp, Artificial Sequence
  Description of Artificial Sequence: Synthetic probe
cctaggcaaaaaatacatttcagaatgaat

SEQ ID NO: 1311 - DNA, 31 bp, Artificial Sequence
  Description of Artificial Sequence: Synthetic probe
acaatttactctcccatgtaccattcttacc

SEQ ID NO: 1312 - DNA, 31 bp, Artificial Sequence
  Description of Artificial Sequence: Synthetic probe
gcactagaacacattactttgatgacaaatc

SEQ ID NO: 1313 - DNA, 31 bp, Artificial Sequence
  Description of Artificial Sequence: Synthetic probe
aaccttatctccaccagcaaactattaaaaa

SEQ ID NO: 1314 - DNA, 31 bp, Artificial Sequence
  Description of Artificial Sequence: Synthetic probe
ccaaaataatgtgatggaatgataaaccaag

SEQ ID NO: 1315 - DNA, 25 bp, Artificial Sequence
  Description of Artificial Sequence: Synthetic probe
gggtgtttcctgtgagtggatttcc

SEQ ID NO: 1316 - DNA, 28 bp, Artificial Sequence
  Description of Artificial Sequence: Synthetic probe
agcctgatagaacatctgttccttgtga

SEQ ID NO: 1317 - DNA, 23 bp, Artificial Sequence
  Description of Artificial Sequence: Synthetic probe
gaagtagctggatgagaagcgcc

SEQ ID NO: 1318 - DNA, 29 bp, Artificial Sequence
  Description of Artificial Sequence: Synthetic probe
ggcatagaccttatcactacttccagaag

SEQ ID NO: 1319 - DNA, 33 bp, Artificial Sequence
  Description of Artificial Sequence: Synthetic probe
ttattacagaataaaggaggtaggctgtacttt

SEQ ID NO: 1320 - DNA, 22 bp, Artificial Sequence
  Description of Artificial Sequence: Synthetic probe
aaccttggcagttgaggcccta

SEQ ID NO: 1321 - DNA, 26 bp, Artificial Sequence
  Description of Artificial Sequence: Synthetic probe
tagtagctctgcttgttcacacactc

SEQ ID NO: 1322 - DNA, 35 bp, Artificial Sequence
  Description of Artificial Sequence: Synthetic probe
atattagtggagagctactattttcagaaacgatc

SEQ ID NO: 1323 - DNA, 30 bp, Artificial Sequence
  Description of Artificial Sequence: Synthetic probe
acaacagaagtataagaatggctgtcacac

SEQ ID NO: 1324 - DNA, 28 bp, Artificial Sequence
  Description of Artificial Sequence: Synthetic probe
tttatcattccagatcaaagggtggtca

SEQ ID NO: 1325 - DNA, 28 bp, Artificial Sequence
  Description of Artificial Sequence: Synthetic probe
tctcctaaagattgtatgaggtcctgtc

SEQ ID NO: 1326 - DNA, 30 bp, Artificial Sequence
  Description of Artificial Sequence: Synthetic probe
cactttgtatcggaatacagagaaagaaga

SEQ ID NO: 1327 - DNA, 19 bp, Artificial Sequence
  Description of Artificial Sequence: Synthetic probe
ctgcatcacctcccagggc

SEQ ID NO: 1328 - DNA, 24 bp, Artificial Sequence
  Description of Artificial Sequence: Synthetic probe
cagctaagtgcagggacagataca

SEQ ID NO: 1329 - DNA, 21 bp, Artificial Sequence
  Description of Artificial Sequence: Synthetic probe
agggtgacaggaggatggctc

SEQ ID NO: 1330 - DNA, 20 bp, Artificial Sequence
  Description of Artificial Sequence: Synthetic probe
agcggagttcgtacctcagg

SEQ ID NO: 1331 - DNA, 25 bp, Artificial Sequence
  Description of Artificial Sequence: Synthetic probe
ttgaaggtaggagataagaggtggg

SEQ ID NO: 1332 - DNA, 27 bp, Artificial Sequence
  Description of Artificial Sequence: Synthetic probe
catctccctattcctttgttgactcac

SEQ ID NO: 1333 - DNA, 24 bp, Artificial Sequence
  Description of Artificial Sequence: Synthetic probe
aacctcaatcagcagttcagctct

SEQ ID NO: 1334 - DNA, 22 bp, Artificial Sequence
  Description of Artificial Sequence: Synthetic probe
agcccaggtagctgtgaacagt

SEQ ID NO: 1335 - DNA, 25 bp, Artificial Sequence
  Description of Artificial Sequence: Synthetic probe
gtgggcatttgttgcttgaccatac

SEQ ID NO: 1336 - DNA, 22 bp, Artificial Sequence
  Description of Artificial Sequence: Synthetic probe
ctagttgggtccgaccacgagc

SEQ ID NO: 1337 - DNA, 19 bp, Artificial Sequence
  Description of Artificial Sequence: Synthetic probe
ggtccaccgccagtctcct

SEQ ID NO: 1338 - DNA, 21 bp, Artificial Sequence
  Description of Artificial Sequence: Synthetic probe
actggtagggcaaggaccttg

SEQ ID NO: 1339 - DNA, 21 bp, Artificial Sequence
  Description of Artificial Sequence: Synthetic probe
ccagggaactgggagtgagga

SEQ ID NO: 1340 - DNA, 26 bp, Artificial Sequence
  Description of Artificial Sequence: Synthetic probe
gtgaagcagggaacaatcactaatac

SEQ ID NO: 1341 - DNA, 31 bp, Artificial Sequence
  Description of Artificial Sequence: Synthetic probe
ggcacacttgatgaattatgtagttcattgt

SEQ ID NO: 1342 - DNA, 29 bp, Artificial Sequence
  Description of Artificial Sequence: Synthetic probe
gtctattctcacaaaaactgtttgttgct

SEQ ID NO: 1343 - DNA, 32 bp, Artificial Sequence
  Description of Artificial Sequence: Synthetic probe
cataatgcacatttcatctttttcattctagc

SEQ ID NO: 1344 - DNA, 29 bp, Artificial Sequence
  Description of Artificial Sequence: Synthetic probe
gttgtatgaaataaaccttagctgctgat

SEQ ID NO: 1345 - DNA, 31 bp, Artificial Sequence
  Description of Artificial Sequence: Synthetic probe
ggtacgttatctcattgtgtgtactttctcc

SEQ ID NO: 1346 - DNA, 31 bp, Artificial Sequence
  Description of Artificial Sequence: Synthetic probe
atgtttgtgatttactctgttatgatctagg

SEQ ID NO: 1347 - DNA, 28 bp, Artificial Sequence
  Description of Artificial Sequence: Synthetic probe
aaaactatttctgcatccagtgatttgt

SEQ ID NO: 1348 - DNA, 30 bp, Artificial Sequence
  Description of Artificial Sequence: Synthetic probe
tgcaatgagtatgcacattttaacattatg

SEQ ID NO: 1349 - DNA, 27 bp, Artificial Sequence
  Description of Artificial Sequence: Synthetic probe
aaattggcaaattgttgtttcctagcg

SEQ ID NO: 1350 - DNA, 30 bp, Artificial Sequence
  Description of Artificial Sequence: Synthetic probe
agccaagttaaactcagtttactacgttgt

SEQ ID NO: 1351 - DNA, 24 bp, Artificial Sequence
  Description of Artificial Sequence: Synthetic probe
actgtgactcggtgttcatttctc

SEQ ID NO: 1352 - DNA, 21 bp, Artificial Sequence
  Description of Artificial Sequence: Synthetic probe
acaacctggaagctcagtggt

SEQ ID NO: 1353 - DNA, 34 bp, Artificial Sequence
  Description of Artificial Sequence: Synthetic probe
gaaggatgcaataaaatctttagtgaatggagaa

SEQ ID NO: 1354 - DNA, 33 bp, Artificial Sequence
  Description of Artificial Sequence: Synthetic probe
gaagcaaaatagattcattttttaagccgaagt

SEQ ID NO: 1355 - DNA, 35 bp, Artificial Sequence
  Description of Artificial Sequence: Synthetic probe
gatattcatgcagatacctacttttacatacacac

SEQ ID NO: 1356 - DNA, 28 bp, Artificial Sequence
  Description of Artificial Sequence: Synthetic probe
gaaaacagcttttgtcccgtatggaaat

SEQ ID NO: 1357 - DNA, 20 bp, Artificial Sequence
  Description of Artificial Sequence: Synthetic probe
atgggtgatcggcctgtcca

SEQ ID NO: 1358 - DNA, 33 bp, Artificial Sequence
  Description of Artificial Sequence: Synthetic probe
ccagattgaaagtccctttgaataaataaaatg

SEQ ID NO: 1359 - DNA, 30 bp, Artificial Sequence
  Description of Artificial Sequence: Synthetic probe
tcagatgaactctaaggctaaaaaaaatga

SEQ ID NO: 1360 - DNA, 22 bp, Artificial Sequence
  Description of Artificial Sequence: Synthetic probe
cctggtcccagaggagcttgac

SEQ ID NO: 1361 - DNA, 19 bp, Artificial Sequence
  Description of Artificial Sequence: Synthetic probe
aaaggagccgcgccacaag

SEQ ID NO: 1362 - DNA, 33 bp, Artificial Sequence
  Description of Artificial Sequence: Synthetic probe
ttcaaaattcattttactaagcacaacactctg

SEQ ID NO: 1363 - DNA, 32 bp, Artificial Sequence
  Description of Artificial Sequence: Synthetic probe
tctcaaaccattctactatcacaatctactta

SEQ ID NO: 1364 - DNA, 28 bp, Artificial Sequence
  Description of Artificial Sequence: Synthetic probe
ttgttaccaaagagaatgtcttcaaact

SEQ ID NO: 1365 - DNA, 25 bp, Artificial Sequence
  Description of Artificial Sequence: Synthetic probe
ggcctggaatctcctctatcactag

SEQ ID NO: 1366 - DNA, 29 bp, Artificial Sequence
  Description of Artificial Sequence: Synthetic probe
aaaagtcagctttttttctttctgtgatc

SEQ ID NO: 1367 - DNA, 33 bp, Artificial Sequence
  Description of Artificial Sequence: Synthetic probe
ggttttgagataaatatgacagaaatatccttc

SEQ ID NO: 1368 - DNA, 30 bp, Artificial Sequence
  Description of Artificial Sequence: Synthetic probe
agcttcttcagtatatgtcaatgaaaacat

SEQ ID NO: 1369 - DNA, 32 bp, Artificial Sequence
  Description of Artificial Sequence: Synthetic probe
ctgcaggttacataaaactaacgaaagtataa

SEQ ID NO: 1370 - DNA, 29 bp, Artificial Sequence
  Description of Artificial Sequence: Synthetic probe
gggaatcgacgaagtaaatcttcttgtaa

SEQ ID NO: 1371 - DNA, 25 bp, Artificial Sequence
  Description of Artificial Sequence: Synthetic probe
tgaggacagcacattgccaagtata

SEQ ID NO: 1372 - DNA, 32 bp, Artificial Sequence
  Description of Artificial Sequence: Synthetic probe
caaactttcttaaagtggcctttgctttttaa

SEQ ID NO: 1373 - DNA, 32 bp, Artificial Sequence
  Description of Artificial Sequence: Synthetic probe
agtgtatagacaaaagaattattccaacctcc

SEQ ID NO: 1374 - DNA, 29 bp, Artificial Sequence
  Description of Artificial Sequence: Synthetic probe
ccaagccttgataatcaagaagaaaagaa

SEQ ID NO: 1375 - DNA, 32 bp, Artificial Sequence
  Description of Artificial Sequence: Synthetic probe
aacattcacatcatgttagagcatttagggaa

SEQ ID NO: 1376 - DNA, 27 bp, Artificial Sequence
  Description of Artificial Sequence: Synthetic probe
ctgttaccaaaagccaggtgacattca

SEQ ID NO: 1377 - DNA, 23 bp, Artificial Sequence
  Description of Artificial Sequence: Synthetic probe
cgtgagcaaagctgacaacagca

SEQ ID NO: 1378 - DNA, 24 bp, Artificial Sequence
  Description of Artificial Sequence: Synthetic probe
cacaaagcccaaaaaccaggtttt

SEQ ID NO: 1379 - DNA, 22 bp, Artificial Sequence
  Description of Artificial Sequence: Synthetic probe
tggcacaaaacacccaatttgg

SEQ ID NO: 1380 - DNA, 27 bp, Artificial Sequence
  Description of Artificial Sequence: Synthetic probe
ttctcacaggacagagacatacatttc

SEQ ID NO: 1381 - DNA, 27 bp, Artificial Sequence
  Description of Artificial Sequence: Synthetic probe
aaatccatcgtaggtagaagttcctct

SEQ ID NO: 1382 - DNA, 31 bp, Artificial Sequence
  Description of Artificial Sequence: Synthetic probe
agtttcccattaccaagttctgaatttagag

SEQ ID NO: 1383 - DNA, 32 bp, Artificial Sequence
  Description of Artificial Sequence: Synthetic probe
tagtgtcctgtttatgtaataatagagaagct

SEQ ID NO: 1384 - DNA, 30 bp, Artificial Sequence
  Description of Artificial Sequence: Synthetic probe
atattaccttcattccattactgggatttt

SEQ ID NO: 1385 - DNA, 21 bp, Artificial Sequence
  Description of Artificial Sequence: Synthetic probe
cttgttggcatcactcagcgc

SEQ ID NO: 1386 - DNA, 18 bp, Artificial Sequence
  Description of Artificial Sequence: Synthetic probe
caagccaactctgcggcc

SEQ ID NO: 1387 - DNA, 26 bp, Artificial Sequence
  Description of Artificial Sequence: Synthetic probe
cacaaacacacacacatggcagtagt

SEQ ID NO: 1388 - DNA, 24 bp, Artificial Sequence
  Description of Artificial Sequence: Synthetic probe
ataacaactgaatgcttgccgtgt

SEQ ID NO: 1389 - DNA, 22 bp, Artificial Sequence
  Description of Artificial Sequence: Synthetic probe
tccgctttcgagcaactttgac

SEQ ID NO: 1390 - DNA, 28 bp, Artificial Sequence
  Description of Artificial Sequence: Synthetic probe
atctttctacatcgtgcctccatcattt

SEQ ID NO: 1391 - DNA, 25 bp, Artificial Sequence
  Description of Artificial Sequence: Synthetic probe
agcagagagggccaattcacttttc

SEQ ID NO: 1392 - DNA, 26 bp, Artificial Sequence
  Description of Artificial Sequence: Synthetic probe
cacattactttgaatccttccagagc

SEQ ID NO: 1393 - DNA, 28 bp, Artificial Sequence
  Description of Artificial Sequence: Synthetic probe
cactacttatcaaagcctgagaacaagc

SEQ ID NO: 1394 - DNA, 29 bp, Artificial Sequence
  Description of Artificial Sequence: Synthetic probe
gatggcgtgatcctttaagctctaagaag

SEQ ID NO: 1395 - DNA, 31 bp, Artificial Sequence
  Description of Artificial Sequence: Synthetic probe
cacctaagtatgttattcctaatgtcacaaa

SEQ ID NO: 1396 - DNA, 32 bp, Artificial Sequence
  Description of Artificial Sequence: Synthetic probe
cttttatcacatctaaatgactgaatgagaac

SEQ ID NO: 1397 - DNA, 31 bp, Artificial Sequence
  Description of Artificial Sequence: Synthetic probe
agtcttcaaatgagaagtttaatgtcttacc

SEQ ID NO: 1398 - DNA, 25 bp, Artificial Sequence
  Description of Artificial Sequence: Synthetic probe
ccctctcaaaaaaccgaatttgtgg

SEQ ID NO: 1399 - DNA, 32 bp, Artificial Sequence
  Description of Artificial Sequence: Synthetic probe
tcataatgttgtctgaatttaccacctttgtc

SEQ ID NO: 1400 - DNA, 31 bp, Artificial Sequence
  Description of Artificial Sequence: Synthetic probe
cccttttgaataacttcctctgggagattag

SEQ ID NO: 1401 - DNA, 32 bp, Artificial Sequence; identical to SEQ ID NO: 1399
  Description of Artificial Sequence: Synthetic probe

SEQ ID NO: 1402 - DNA, 30 bp, Artificial Sequence
  Description of Artificial Sequence: Synthetic probe
atctgtgtaaacctttgaagaagctcaaat

SEQ ID NO: 1403 - DNA, 27 bp, Artificial Sequence
  Description of Artificial Sequence: Synthetic probe
attgccaggaagagagtgaaatgtttt

SEQ ID NO: 1404 - DNA, 29 bp, Artificial Sequence
  Description of Artificial Sequence: Synthetic probe
atatttgagaaaaacagggcacccattga

SEQ ID NO: 1405 - DNA, 24 bp, Artificial Sequence
  Description of Artificial Sequence: Synthetic probe
accaacagtggctttttggtgttt

SEQ ID NO: 1406 - DNA, 32 bp, Artificial Sequence
  Description of Artificial Sequence: Synthetic probe
gcatgtttcaatactctttatttctctcccta

SEQ ID NO: 1407 - DNA, 25 bp, Artificial Sequence
  Description of Artificial Sequence: Synthetic probe
gttagtaactcctgtggtgagtggc

SEQ ID NO: 1408 - DNA, 27 bp, Artificial Sequence
  Description of Artificial Sequence: Synthetic probe
ctggctccaggtaaagaaaataaacat

SEQ ID NO: 1409 - DNA, 26 bp, Artificial Sequence
  Description of Artificial Sequence: Synthetic probe
ctccctgatctgtcttctgtttctca

SEQ ID NO: 1410 - DNA, 25 bp, Artificial Sequence
  Description of Artificial Sequence: Synthetic probe
ccagaaccgtagttcacatgcactc

SEQ ID NO: 1411 - DNA, 26 bp, Artificial Sequence
  Description of Artificial Sequence: Synthetic probe
taggctgctctcttactgaacagttg

SEQ ID NO: 1412 - DNA, 28 bp, Artificial Sequence
  Description of Artificial Sequence: Synthetic probe
atactctctttacggtacactaaccctg

SEQ ID NO: 1413 - DNA, 21 bp, Artificial Sequence
  Description of Artificial Sequence: Synthetic probe
cactcaccgctcccactgttc

SEQ ID NO: 1414 - DNA, 20 bp, Artificial Sequence
  Description of Artificial Sequence: Synthetic probe
cttctgatgtgccgggacct

SEQ ID NO: 1415 - DNA, 28 bp, Artificial Sequence
  Description of Artificial Sequence: Synthetic probe
cctgggttggttgagactttgataactt

SEQ ID NO: 1416 - DNA, 22 bp, Artificial Sequence
  Description of Artificial Sequence: Synthetic probe
ctctggcatgagatgtggcatg

SEQ ID NO: 1417 - DNA, 30 bp, Artificial Sequence
  Description of Artificial Sequence: Synthetic probe
cccaacccacatttcctttatagatgtttc

SEQ ID NO: 1418 - DNA, 31 bp, Artificial Sequence
  Description of Artificial Sequence: Synthetic probe
tgctacatactgtgtctttttgaataccagg

SEQ ID NO: 1419 - DNA, 22 bp, Artificial Sequence
  Description of Artificial Sequence: Synthetic probe
caggcaggcaaaaactgggaaa

SEQ ID NO: 1420 - DNA, 23 bp, Artificial Sequence
  Description of Artificial Sequence: Synthetic probe
gatgagaaagcagaggcaagagt

SEQ ID NO: 1421 - DNA, 22 bp, Artificial Sequence
  Description of Artificial Sequence: Synthetic probe
gtcacagctccagtgtctgtcc

SEQ ID NO: 1422 - DNA, 23 bp, Artificial Sequence
  Description of Artificial Sequence: Synthetic probe
cttaggagggctgttttgaggag

SEQ ID NO: 1423 - DNA, 24 bp, Artificial Sequence
  Description of Artificial Sequence: Synthetic probe
caagtggctctctgtgcctttgtc

SEQ ID NO: 1424 - DNA, 30 bp, Artificial Sequence
  Description of Artificial Sequence: Synthetic probe
taaggctcttgctcataaaactttagtgtt

SEQ ID NO: 1425 - DNA, 33 bp, Artificial Sequence
  Description of Artificial Sequence: Synthetic probe
caatgtatcagaagacatatctaatcttcactt

SEQ ID NO: 1426 - DNA, 26 bp, Artificial Sequence
  Description of Artificial Sequence: Synthetic probe
tcttttggattgttcgtgcagtaatt

SEQ ID NO: 1427 - DNA, 21 bp, Artificial Sequence
  Description of Artificial Sequence: Synthetic probe
aaccctaagctcccaagtcca

SEQ ID NO: 1428 - DNA, 26 bp, Artificial Sequence
  Description of Artificial Sequence: Synthetic probe
cttgatgctttctgtctatgtgtgtg

SEQ ID NO: 1429 - DNA, 28 bp, Artificial Sequence
  Description of Artificial Sequence: Synthetic probe
gagaggaagattggtagtttaaggagat

SEQ ID NO: 1430 - DNA, 27 bp, Artificial Sequence
  Description of Artificial Sequence: Synthetic probe
tacctcacagcagtctttctttcccat

SEQ ID NO: 1431 - DNA, 26 bp, Artificial Sequence
  Description of Artificial Sequence: Synthetic probe
cctcagacctgttgagtgtaactacc

SEQ ID NO: 1432 - DNA, 23 bp, Artificial Sequence
  Description of Artificial Sequence: Synthetic probe
tgtgaggttttgctcttctccag

SEQ ID NO: 1433 - DNA, 24 bp, Artificial Sequence
  Description of Artificial Sequence: Synthetic probe
tccattttccaccttctctgcctt

SEQ ID NO: 1434 - DNA, 29 bp, Artificial Sequence
  Description of Artificial Sequence: Synthetic probe
gaaactgattgttttccattgtcacctgt

SEQ ID NO: 1435 - DNA, 31 bp, Artificial Sequence
  Description of Artificial Sequence: Synthetic probe
gatatttcctaaaccagaagcatctagtaga

SEQ ID NO: 1436 - DNA, 31 bp, Artificial Sequence
  Description of Artificial Sequence: Synthetic probe
ctactttttctccactctccaaaatgatagt

SEQ ID NO: 1437 - DNA, 34 bp, Artificial Sequence
  Description of Artificial Sequence: Synthetic probe
gagattgtatgttagcagttactgtatgttagtg

SEQ ID NO: 1438 - DNA, 23 bp, Artificial Sequence
  Description of Artificial Sequence: Synthetic probe
caccatgcttttgctcccttttg

SEQ ID NO: 1439 - DNA, 25 bp, Artificial Sequence
  Description of Artificial Sequence: Synthetic probe
gacctgactcagctcctctgacttt

SEQ ID NO: 1440 - DNA, 24 bp, Artificial Sequence
  Description of Artificial Sequence: Synthetic probe
ctggttgacctcttgtccatttca

SEQ ID NO: 1441 - DNA, 23 bp, Artificial Sequence
  Description of Artificial Sequence: Synthetic probe
cctgggactcaaatgtgtgcagt

SEQ ID NO: 1442 - DNA, 31 bp, Artificial Sequence
  Description of Artificial Sequence: Synthetic probe
tagctctaacactctctgttgttttgtccta

SEQ ID NO: 1443 - DNA, 29 bp, Artificial Sequence
  Description of Artificial Sequence: Synthetic probe
atgttgtgatgaatgttttcttttttccc

SEQ ID NO: 1444 - DNA, 24 bp, Artificial Sequence
  Description of Artificial Sequence: Synthetic probe
tctcgtactggctcattgaatcgt

SEQ ID NO: 1445 - DNA, 23 bp, Artificial Sequence
  Description of Artificial Sequence: Synthetic probe
ctaaccctttctgccaccctctt

SEQ ID NO: 1446 - DNA, 33 bp, Artificial Sequence
  Description of Artificial Sequence: Synthetic probe
atctgcattcattttctcataacttctttctct

SEQ ID NO: 1447 - DNA, 27 bp, Artificial Sequence
  Description of Artificial Sequence: Synthetic probe
ctagaatgtcttctgccatagagaaca

SEQ ID NO: 1448 - DNA, 25 bp, Artificial Sequence
  Description of Artificial Sequence: Synthetic probe
atgaggaaatgttcaaaggctccat

SEQ ID NO: 1449 - DNA, 25 bp, Artificial Sequence
  Description of Artificial Sequence: Synthetic probe
ttttctctctgcctttctatccagg

SEQ ID NO: 1450 - DNA, 24 bp, Artificial Sequence
  Description of Artificial Sequence: Synthetic probe
cccagcccttatgtgacttgtttc

SEQ ID NO: 1451 - DNA, 33 bp, Artificial Sequence
  Description of Artificial Sequence: Synthetic probe
ttttgaggtgggacattaaagaatgtcattatg

SEQ ID NO: 1452 - DNA, 25 bp, Artificial Sequence
  Description of Artificial Sequence: Synthetic probe
ctgacctggagctatctactttgtc

SEQ ID NO: 1453 - DNA, 25 bp, Artificial Sequence
  Description of Artificial Sequence: Synthetic probe
ccctcttttcctaagctccacacct

SEQ ID NO: 1454 - DNA, 21 bp, Artificial Sequence
  Description of Artificial Sequence: Synthetic probe
tgcccagtttgaatgccagtc

SEQ ID NO: 1455 - DNA, 29 bp, Artificial Sequence
  Description of Artificial Sequence: Synthetic probe
attctttctgggtttgtactctgtctcta

SEQ ID NO: 1456 - DNA, 28 bp, Artificial Sequence
  Description of Artificial Sequence: Synthetic probe
caatgagagttctcggtttgcttttttc

SEQ ID NO: 1457 - DNA, 28 bp, Artificial Sequence
  Description of Artificial Sequence: Synthetic probe
tcatcaccttttgccttcctctcttttg

SEQ ID NO: 1458 - DNA, 28 bp, Artificial Sequence
  Description of Artificial Sequence: Synthetic probe
tcccaccaccacagttagagaattatta

SEQ ID NO: 1459 - DNA, 26 bp, Artificial Sequence
  Description of Artificial Sequence: Synthetic probe
acttctctctaaagaacctcagggca

SEQ ID NO: 1460 - DNA, 24 bp, Artificial Sequence
  Description of Artificial Sequence: Synthetic probe
ggcctccctccttccattttttca

SEQ ID NO: 1461 - DNA, 25 bp, Artificial Sequence
  Description of Artificial Sequence: Synthetic probe
tcacctccctgtcttcttgtctagg

SEQ ID NO: 1462 - DNA, 23 bp, Artificial Sequence
  Description of Artificial Sequence: Synthetic probe
aggatgttggcttttgaggctat

SEQ ID NO: 1463 - DNA, 22 bp, Artificial Sequence
  Description of Artificial Sequence: Synthetic probe
ccctcttggcttgagtagggtt

SEQ ID NO: 1464 - DNA, 25 bp, Artificial Sequence
  Description of Artificial Sequence: Synthetic probe
aaggatgttggcttttgaggctata

SEQ ID NO: 1465 - DNA, 19 bp, Artificial Sequence
  Description of Artificial Sequence: Synthetic probe
tgggaccagaccctgggag

SEQ ID NO: 1466 - DNA, 21 bp, Artificial Sequence
  Description of Artificial Sequence: Synthetic probe
ccggccaggagatttcaacca

SEQ ID NO: 1467 - DNA, 29 bp, Artificial Sequence
  Description of Artificial Sequence: Synthetic probe
ataatcttgagtcttgcactccaatcagg

SEQ ID NO: 1468 - DNA, 20 bp, Artificial Sequence
  Description of Artificial Sequence: Synthetic probe
caacactggacagtgccacc

SEQ ID NO: 1469 - DNA, 21 bp, Artificial Sequence
  Description of Artificial Sequence: Synthetic probe
ccggccaggagatttcaacca

SEQ ID NO: 1470 - DNA, 29 bp, Artificial Sequence
  Description of Artificial Sequence: Synthetic probe
ataatcttgagtcttgcactccaatcagg

SEQ ID NO: 1471 - DNA, 20 bp, Artificial Sequence
  Description of Artificial Sequence: Synthetic probe
caacactggacagtgccacc

SEQ ID NO: 1472 - DNA, 26 bp, Artificial Sequence
  Description of Artificial Sequence: Synthetic probe
cacagcagtgttcccttcttttaggg

SEQ ID NO: 1473 - DNA, 19 bp, Artificial Sequence
  Description of Artificial Sequence: Synthetic probe
gggatggcaggagggtagg

SEQ ID NO: 1474 - DNA, 20 bp, Artificial Sequence
  Description of Artificial Sequence: Synthetic probe
cagtgtcctcatgccaaccc

SEQ ID NO: 1475 - DNA, 26 bp, Artificial Sequence
  Description of Artificial Sequence: Synthetic probe
cacagcagtgttcccttcttttaggg

SEQ ID NO: 1476 - DNA, 19 bp, Artificial Sequence
  Description of Artificial Sequence: Synthetic probe
gggatggcaggagggtagg

SEQ ID NO: 1477 - DNA, 20 bp, Artificial Sequence
  Description of Artificial Sequence: Synthetic probe
cagtgtcctcatgccaaccc

SEQ ID NO: 1478 - DNA, 19 bp, Artificial Sequence
  Description of Artificial Sequence: Synthetic probe
gggatggcaggagggtagg

SEQ ID NO: 1479 - DNA, 20 bp, Artificial Sequence
  Description of Artificial Sequence: Synthetic probe
cagtgtcctcatgccaaccc

SEQ ID NO: 1480 - DNA, 19 bp, Artificial Sequence
  Description of Artificial Sequence: Synthetic probe
gggatggcaggagggtagg

SEQ ID NO: 1481 - DNA, 20 bp, Artificial Sequence
  Description of Artificial Sequence: Synthetic probe
cagtgtcctcatgccaaccc

SEQ ID NO: 1482 - DNA, 20 bp, Artificial Sequence
  Description of Artificial Sequence: Synthetic probe
atactgccacaggctgctgt

SEQ ID NO: 1483 - DNA, 27 bp, Artificial Sequence
  Description of Artificial Sequence: Synthetic probe
tatgctggtcagtacatctcctgagag

SEQ ID NO: 1484 - DNA, 20 bp, Artificial Sequence
  Description of Artificial Sequence: Synthetic probe
atactgccacaggctgctgt

SEQ ID NO: 1485 - DNA, 24 bp, Artificial Sequence
  Description of Artificial Sequence: Synthetic probe
ttggctgggtctttttgtttcagg

SEQ ID NO: 1486 - DNA, 20 bp, Artificial Sequence
  Description of Artificial Sequence: Synthetic probe
gctgaaactgcgccatcgtc

SEQ ID NO: 1487 - DNA, 28 bp, Artificial Sequence
  Description of Artificial Sequence: Synthetic probe
aataaattaaaaggcaagtggacttcgg

SEQ ID NO: 1488 - DNA, 20 bp, Artificial Sequence
  Description of Artificial Sequence: Synthetic probe
gcaacgtaggagggcgagca

SEQ ID NO: 1489 - DNA, 23 bp, Artificial Sequence
  Description of Artificial Sequence: Synthetic probe
gtatccagccgcccacttttgac

SEQ ID NO: 1490 - DNA, 23 bp, Artificial Sequence
  Description of Artificial Sequence: Synthetic probe
cgtagttgtgctgatgtgtggag

SEQ ID NO: 1491 - DNA, 29 bp, Artificial Sequence
  Description of Artificial Sequence: Synthetic probe
tgttagaaggaatcgttttccttactttt

SEQ ID NO: 1492 - DNA, 20 bp, Artificial Sequence
  Description of Artificial Sequence: Synthetic probe
tcctcgcctgtggacaacac

SEQ ID NO: 1493 - DNA, 20 bp, Artificial Sequence
  Description of Artificial Sequence: Synthetic probe
ctgcagcatggcatggtagg

SEQ ID NO: 1494 - DNA, 18 bp, Artificial Sequence
  Description of Artificial Sequence: Synthetic probe
catgctctcgcccgtgga

SEQ ID NO: 1495 - DNA, 24 bp, Artificial Sequence
  Description of Artificial Sequence: Synthetic probe
cttcctctggtgatggaaccttgg

SEQ ID NO: 1496 - DNA, 18 bp, Artificial Sequence
  Description of Artificial Sequence: Synthetic probe
tcacgcaggcaagtccgc

SEQ ID NO: 1497 - DNA, 19 bp, Artificial Sequence
  Description of Artificial Sequence: Synthetic probe
ggtgtacgtctgcccagca

SEQ ID NO: 1498 - DNA, 19 bp, Artificial Sequence
  Description of Artificial Sequence: Synthetic probe
ctcacgctctgatgccgcc

SEQ ID NO: 1499 - DNA, 20 bp, Artificial Sequence
  Description of Artificial Sequence: Synthetic probe
gagcacccgtctctgcctct

SEQ ID NO: 1500 - DNA, 19 bp, Artificial Sequence
  Description of Artificial Sequence: Synthetic probe
accggcagtggactcagca

SEQ ID NO: 1501 - DNA, 22 bp, Artificial Sequence
  Description of Artificial Sequence: Synthetic probe
gctcagcctcacttctcgaccc

SEQ ID NO: 1502 - DNA, 23 bp, Artificial Sequence
  Description of Artificial Sequence: Synthetic probe
acctggagaccaagaagttccgg

SEQ ID NO: 1503 - DNA, 18 bp, Artificial Sequence
  Description of Artificial Sequence: Synthetic probe
tgcgtagccgctgcctga

SEQ ID NO: 1504 - DNA, 22 bp, Artificial Sequence
  Description of Artificial Sequence: Synthetic probe
gctcagcctcacttctcgaccc

SEQ ID NO: 1505 - DNA, 18 bp, Artificial Sequence
  Description of Artificial Sequence: Synthetic probe
tgcgtagccgctgcctga

SEQ ID NO: 1506 - DNA, 20 bp, Artificial Sequence
  Description of Artificial Sequence: Synthetic probe
ccctctctgattgtccgccc

SEQ ID NO: 1507 - DNA, 20 bp, Artificial Sequence
  Description of Artificial Sequence: Synthetic probe
acacggccagcagatgatct

SEQ ID NO: 1508 - DNA, 21 bp, Artificial Sequence
  Description of Artificial Sequence: Synthetic probe
gacagccagtgcaactcagcc

SEQ ID NO: 1509 - DNA, 22 bp, Artificial Sequence
  Description of Artificial Sequence: Synthetic probe
cgacaccgtcctgtcttccctc

SEQ ID NO: 1510 - DNA, 19 bp, Artificial Sequence
  Description of Artificial Sequence: Synthetic probe
gcagcagggtgagcctctc

SEQ ID NO: 1511 - DNA, 22 bp, Artificial Sequence
  Description of Artificial Sequence: Synthetic probe
cttgggccactgacgaaacctg

SEQ ID NO: 1512 - DNA, 21 bp, Artificial Sequence
  Description of Artificial Sequence: Synthetic probe
tcgttctgtcgcctgcacagt

SEQ ID NO: 1513 - DNA, 18 bp, Artificial Sequence
  Description of Artificial Sequence: Synthetic probe
tctgtgtggacgcgggca

SEQ ID NO: 1514 - DNA, 21 bp, Artificial Sequence
  Description of Artificial Sequence: Synthetic probe
tgtgcgttctgagctaccggg

SEQ ID NO: 1515 - DNA, 20 bp, Artificial Sequence
  Description of Artificial Sequence: Synthetic probe
gacccaccaatgccctccac

SEQ ID NO: 1516 - DNA, 20 bp, Artificial Sequence
  Description of Artificial Sequence: Synthetic probe
cacactcacccttccgtcct

SEQ ID NO: 1517 - DNA, 19 bp, Artificial Sequence
  Description of Artificial Sequence: Synthetic probe
accaaccggcctcctcctg

SEQ ID NO: 1518 - DNA, 20 bp, Artificial Sequence
  Description of Artificial Sequence: Synthetic probe
cacgtgtgtctccttcccgc

SEQ ID NO: 1519 - DNA, 18 bp, Artificial Sequence
  Description of Artificial Sequence: Synthetic probe
aggtgcctgggagtgctg

SEQ ID NO: 1520 - DNA, 18 bp, Artificial Sequence
  Description of Artificial Sequence: Synthetic probe
agggcattgcagacccgg

SEQ ID NO: 1521 - DNA, 20 bp, Artificial Sequence
  Description of Artificial Sequence: Synthetic probe
ctgacccgccctgcccttag

SEQ ID NO: 1522 - DNA, 22 bp, Artificial Sequence
  Description of Artificial Sequence: Synthetic probe
actgcgagaccaacatcaacga

SEQ ID NO: 1523 - DNA, 22 bp, Artificial Sequence
  Description of Artificial Sequence: Synthetic probe
ccctgaagggccatagtgctgt

SEQ ID NO: 1524 - DNA, 22 bp, Artificial Sequence
  Description of Artificial Sequence: Synthetic probe
tttctgtcccaagtccacagct

SEQ ID NO: 1525 - DNA, 20 bp, Artificial Sequence
  Description of Artificial Sequence: Synthetic probe
gagcagcctctcacccgtgt

SEQ ID NO: 1526 - DNA, 21 bp, Artificial Sequence
  Description of Artificial Sequence: Synthetic probe
ccggaacgtcccaagtgtcac

SEQ ID NO: 1527 - DNA, 19 bp, Artificial Sequence
  Description of Artificial Sequence: Synthetic probe
agctcagggagtggcagct

SEQ ID NO: 1528 - DNA, 21 bp, Artificial Sequence
  Description of Artificial Sequence: Synthetic probe
ggactggacctcagggaagag

SEQ ID NO: 1529 - DNA, 19 bp, Artificial Sequence
  Description of Artificial Sequence: Synthetic probe
acccacgagtgtgcctgcc

SEQ ID NO: 1530 - DNA, 19 bp, Artificial Sequence
  Description of Artificial Sequence: Synthetic probe
agcagtgaggccagcacga

SEQ ID NO: 1531 - DNA, 22 bp, Artificial Sequence
  Description of Artificial Sequence: Synthetic probe
actaactgccctggcacatctg

SEQ ID NO: 1532 - DNA, 19 bp, Artificial Sequence
  Description of Artificial Sequence: Synthetic probe
gtggtggtggtgcgggtga

SEQ ID NO: 1533 - DNA, 19 bp, Artificial Sequence
  Description of Artificial Sequence: Synthetic probe
gaagagagggcgggaccgt

SEQ ID NO: 1534 - DNA, 18 bp, Artificial Sequence
  Description of Artificial Sequence: Synthetic probe
gttgcagccggattcccg

SEQ ID NO: 1535 - DNA, 32 bp, Artificial Sequence
  Description of Artificial Sequence: Synthetic probe
aaactaaaaggctgaaatcaagtagggttaag

SEQ ID NO: 1536 - DNA, 33 bp, Artificial Sequence
  Description of Artificial Sequence: Synthetic probe
ccttaaaacagaattaaaccttgacacaacatc

SEQ ID NO: 1537 - DNA, 33 bp, Artificial Sequence
  Description of Artificial Sequence: Synthetic probe
actgcactaaagaggacaaactaagtagtataa

SEQ ID NO: 1538 - DNA, 24 bp, Artificial Sequence
  Description of Artificial Sequence: Synthetic probe
gcagaccgctttccagatatactt

SEQ ID NO: 1539 - DNA, 29 bp, Artificial Sequence
  Description of Artificial Sequence: Synthetic probe
tcaaattcctttttttgtcaagattccgg

SEQ ID NO: 1540 - DNA, 33 bp, Artificial Sequence
  Description of Artificial Sequence: Synthetic probe
catttctattgttagtttaacaaccttgtagca

SEQ ID NO: 1541 - DNA, 24 bp, Artificial Sequence
  Description of Artificial Sequence: Synthetic probe
cccaactagatcaatgagacccac

SEQ ID NO: 1542 - DNA, 24 bp, Artificial Sequence
  Description of Artificial Sequence: Synthetic probe
caagtctatgcaaaccagacacgt

SEQ ID NO: 1543 - DNA, 22 bp, Artificial Sequence
  Description of Artificial Sequence: Synthetic probe
acatgtagtgcccaggactgtt

SEQ ID NO: 1544 - DNA, 29 bp, Artificial Sequence
  Description of Artificial Sequence: Synthetic probe
acaaaaaaacttggatttaatcatgtccc

SEQ ID NO: 1545 - DNA, 31 bp, Artificial Sequence
  Description of Artificial Sequence: Synthetic probe
tcaactgttacagaaatgaaataagacggaa

SEQ ID NO: 1546 - DNA, 27 bp, Artificial Sequence
  Description of Artificial Sequence: Synthetic probe
tataatttggattgtgtccgttgagct

SEQ ID NO: 1547 - DNA, 31 bp, Artificial Sequence
  Description of Artificial Sequence: Synthetic probe
gtacccagcctaatcttgtttttcttatgtt

SEQ ID NO: 1548 - DNA, 29 bp, Artificial Sequence
  Description of Artificial Sequence: Synthetic probe
tttaataaaaattgaacttccctccctcc

SEQ ID NO: 1549 - DNA, 25 bp, Artificial Sequence
  Description of Artificial Sequence: Synthetic probe
aaccctgattactggtttccaacag

SEQ ID NO: 1550 - DNA, 23 bp, Artificial Sequence
  Description of Artificial Sequence: Synthetic probe
gtatggctgttggctccttaaca

SEQ ID NO: 1551 - DNA, 25 bp, Artificial Sequence
  Description of Artificial Sequence: Synthetic probe
gctttgccacatctgtactcacagt

SEQ ID NO: 1552 - DNA, 25 bp, Artificial Sequence
  Description of Artificial Sequence: Synthetic probe
gcctcttctgagactgtcctctttt

SEQ ID NO: 1553 - DNA, 22 bp, Artificial Sequence
  Description of Artificial Sequence: Synthetic probe
tcagctctcccttttccgacct

SEQ ID NO: 1554 - DNA, 26 bp, Artificial Sequence
  Description of Artificial Sequence: Synthetic probe
ccttccctttgtttactactccaacc

SEQ ID NO: 1555 - DNA, 25 bp, Artificial Sequence
  Description of Artificial Sequence: Synthetic probe
gggtctcttttgtgctaatcccaag

SEQ ID NO: 1556 - DNA, 26 bp, Artificial Sequence
  Description of Artificial Sequence: Synthetic probe
gtgagtctgtctcattcaccatgata

SEQ ID NO: 1557 - DNA, 25 bp, Artificial Sequence
  Description of Artificial Sequence: Synthetic probe
tccctcagtcttgcattccttctgt

SEQ ID NO: 1558 - DNA, 19 bp, Artificial Sequence
  Description of Artificial Sequence: Synthetic probe
tgcacagtgcccagctttc

SEQ ID NO: 1559 - DNA, 27 bp, Artificial Sequence
  Description of Artificial Sequence: Synthetic probe
tgttgatttgggtctcttagcaatgtg

SEQ ID NO: 1560 - DNA, 23 bp, Artificial Sequence
  Description of Artificial Sequence: Synthetic probe
tgtgtatctgacaccctccttcc

SEQ ID NO: 1561 - DNA, 23 bp, Artificial Sequence
  Description of Artificial Sequence: Synthetic probe
tgggacaggactggaacactctg

SEQ ID NO: 1562 - DNA, 31 bp, Artificial Sequence
  Description of Artificial Sequence: Synthetic probe
tcatgtttacatttttctgttctcctccaag

SEQ ID NO: 1563 - DNA, 21 bp, Artificial Sequence
  Description of Artificial Sequence: Synthetic probe
gcagatcccttctccgtgaga

SEQ ID NO: 1564 - DNA, 19 bp, Artificial Sequence
  Description of Artificial Sequence: Synthetic probe
cacagaatggcaggcgctt

SEQ ID NO: 1565 - DNA, 30 bp, Artificial Sequence
  Description of Artificial Sequence: Synthetic probe
gggtttggaagtacacactaaatataactg

SEQ ID NO: 1566 - DNA, 19 bp, Artificial Sequence
  Description of Artificial Sequence: Synthetic probe
cacagaatggcaggcgctt

SEQ ID NO: 1567 - DNA, 30 bp, Artificial Sequence; identical to SEQ ID NO: 1565
  Description of Artificial Sequence: Synthetic probe

SEQ ID NO: 1568 - DNA, 28 bp, Artificial Sequence
  Description of Artificial Sequence: Synthetic probe
ccttgctgaatgattctctcctttcatc

SEQ ID NO: 1569 - DNA, 21 bp, Artificial Sequence
  Description of Artificial Sequence: Synthetic probe
cctcaagggagagctggcttc

SEQ ID NO: 1570 - DNA, 21 bp, Artificial Sequence
  Description of Artificial Sequence: Synthetic probe
tgtagtcccgcatttgccctc

SEQ ID NO: 1571 - DNA, 28 bp, Artificial Sequence
  Description of Artificial Sequence: Synthetic probe
agttggattcttcctttgaaaagagcta

SEQ ID NO: 1572 - DNA, 24 bp, Artificial Sequence
  Description of Artificial Sequence: Synthetic probe
atggctctggctgtctctcatatc

SEQ ID NO: 1573 - DNA, 21 bp, Artificial Sequence
  Description of Artificial Sequence: Synthetic probe
caagggcttcagcctccttgc

SEQ ID NO: 1574 - DNA, 27 bp, Artificial Sequence
  Description of Artificial Sequence: Synthetic probe
atcatgttcactatccttgcttgtcgc

SEQ ID NO: 1575 - DNA, 27 bp, Artificial Sequence
  Description of Artificial Sequence: Synthetic probe
gagcattgctgtctgtttgattctcca

SEQ ID NO: 1576 - DNA, 28 bp, Artificial Sequence
  Description of Artificial Sequence: Synthetic probe
ttacttccctctgtttctcttccttcta

SEQ ID NO: 1577 - DNA, 21 bp, Artificial Sequence
  Description of Artificial Sequence: Synthetic probe
gtttctaggtcgtggcgtcgg

SEQ ID NO: 1578 - DNA, 19 bp, Artificial Sequence
  Description of Artificial Sequence: Synthetic probe
gcatgccgtcccgcgatat

SEQ ID NO: 1579 - DNA, 26 bp, Artificial Sequence
  Description of Artificial Sequence: Synthetic probe
cttcctggcataccatcttgcttgtc

SEQ ID NO: 1580 - DNA, 25 bp, Artificial Sequence
  Description of Artificial Sequence: Synthetic probe
catggactgaagatcggttccagag

SEQ ID NO: 1581 - DNA, 30 bp, Artificial Sequence
  Description of Artificial Sequence: Synthetic probe
tctcataaatataatggtgccacctcttct

SEQ ID NO: 1582 - DNA, 25 bp, Artificial Sequence
  Description of Artificial Sequence: Synthetic probe
ctgcttctgactttctgaatgccaa

SEQ ID NO: 1583 - DNA, 33 bp, Artificial Sequence
  Description of Artificial Sequence: Synthetic probe
aagaagaggagggtatatttttttgtagtcact

SEQ ID NO: 1584 - DNA, 33 bp, Artificial Sequence
  Description of Artificial Sequence: Synthetic probe
aacagagcacagttttgcctctaaaaaataaaa

SEQ ID NO: 1585 - DNA, 28 bp, Artificial Sequence
  Description of Artificial Sequence: Synthetic probe
ataaggagagaatgcagaagaaaatgtg

SEQ ID NO: 1586 - DNA, 27 bp, Artificial Sequence
  Description of Artificial Sequence: Synthetic probe
tagaagaacaaagtgaagtaacagcac

SEQ ID NO: 1587 - DNA, 21 bp, Artificial Sequence
  Description of Artificial Sequence: Synthetic probe
ggtccaatgggtgttctgggc

SEQ ID NO: 1588 - DNA, 26 bp, Artificial Sequence
  Description of Artificial Sequence: Synthetic probe
tgtctttccaaacgcaaagctagact

SEQ ID NO: 1589 - DNA, 24 bp, Artificial Sequence
  Description of Artificial Sequence: Synthetic probe
aatgggtgttctgggctttgtagc

SEQ ID NO: 1590 - DNA, 23 bp, Artificial Sequence
  Description of Artificial Sequence: Synthetic probe
ctgtgtgtgggagcatgggtaga

SEQ ID NO: 1591 - DNA, 30 bp, Artificial Sequence
  Description of Artificial Sequence: Synthetic probe
aaagcactgagaacattactgtatcccttt

SEQ ID NO: 1592 - DNA, 28 bp, Artificial Sequence
  Description of Artificial Sequence: Synthetic probe
cagacctgttatgaaggtcctctctgaa

SEQ ID NO: 1593 - DNA, 30 bp, Artificial Sequence; identical to SEQ ID NO: 1591
  Description of Artificial Sequence: Synthetic probe

SEQ ID NO: 1594 - DNA, 29 bp, Artificial Sequence
  Description of Artificial Sequence: Synthetic probe
atccaatgtactagaaattgtacttggtc

SEQ ID NO: 1595 - DNA, 30 bp, Artificial Sequence
  Description of Artificial Sequence: Synthetic probe
cacaagtacaacactgcttattttcttgct

SEQ ID NO: 1596 - DNA, 20 bp, Artificial Sequence
  Description of Artificial Sequence: Synthetic probe
agtgggcagaactgggagcc

SEQ ID NO: 1597 - DNA, 30 bp, Artificial Sequence; identical to SEQ ID NO: 1595
  Description of Artificial Sequence: Synthetic probe

SEQ ID NO: 1598 - DNA, 27 bp, Artificial Sequence
  Description of Artificial Sequence: Synthetic probe
aaaaacaagacacccaaacaaggaact

SEQ ID NO: 1599 - DNA, 23 bp, Artificial Sequence
  Description of Artificial Sequence: Synthetic probe
actgccagctcacttcactctcc

SEQ ID NO: 1600 - DNA, 30 bp, Artificial Sequence
  Description of Artificial Sequence: Synthetic probe
agtacatttaacaggagagacaggaagaga

SEQ ID NO: 1601 - DNA, 27 bp, Artificial Sequence
  Description of Artificial Sequence: Synthetic probe
aaggtataatggcagaatcatcatcct

SEQ ID NO: 1602 - DNA, 28 bp, Artificial Sequence
  Description of Artificial Sequence: Synthetic probe
aaagaaggaaggagatgatacaagtacc

SEQ ID NO: 1603 - DNA, 20 bp, Artificial Sequence
  Description of Artificial Sequence: Synthetic probe
tgctctgctccaagccattg

SEQ ID NO: 1604 - DNA, 24 bp, Artificial Sequence
  Description of Artificial Sequence: Synthetic probe
catttctttgacctccctggtagc

SEQ ID NO: 1605 - DNA, 28 bp, Artificial Sequence
  Description of Artificial Sequence: Synthetic probe
cctctgatgcacactaaaaaaaggcata

SEQ ID NO: 1606 - DNA, 24 bp, Artificial Sequence
  Description of Artificial Sequence: Synthetic probe
tggaagacactcatctacagagct

SEQ ID NO: 1607 - DNA, 30 bp, Artificial Sequence
  Description of Artificial Sequence: Synthetic probe
atattctgaccacgaaagaagaagacacat

SEQ ID NO: 1608 - DNA, 24 bp, Artificial Sequence
  Description of Artificial Sequence: Synthetic probe
ttgtcctgactgttgaggaactca

SEQ ID NO: 1609 - DNA, 29 bp, Artificial Sequence
  Description of Artificial Sequence: Synthetic probe
tatgcttgttctcattggcttcaaagatc

SEQ ID NO: 1610 - DNA, 27 bp, Artificial Sequence
  Description of Artificial Sequence: Synthetic probe
aaattgtaaagttgtgtgcaagggaaa

SEQ ID NO: 1611 - DNA, 34 bp, Artificial Sequence
  Description of Artificial Sequence: Synthetic probe
tagctgcatgattttgagaaattcccttaatatc

SEQ ID NO: 1612 - DNA, 21 bp, Artificial Sequence
  Description of Artificial Sequence: Synthetic probe
tcactccaggtcagtgagccc

SEQ ID NO: 1613 - DNA, 32 bp, Artificial Sequence
  Description of Artificial Sequence: Synthetic probe
aagataatgatagacagcaacatctctctttg

SEQ ID NO: 1614 - DNA, 28 bp, Artificial Sequence
  Description of Artificial Sequence: Synthetic probe
gtatcatattaaaccactggaaagtccc

SEQ ID NO: 1615 - DNA, 28 bp, Artificial Sequence
  Description of Artificial Sequence: Synthetic probe
atctgggtctaaaaaggtctgtgttcct

SEQ ID NO: 1616 - DNA, 26 bp, Artificial Sequence
  Description of Artificial Sequence: Synthetic probe
agagattaaagtgaaggaggatgagc

SEQ ID NO: 1617 - DNA, 24 bp, Artificial Sequence
  Description of Artificial Sequence: Synthetic probe
tttccttccagtggtgtttcagaa

SEQ ID NO: 1618 - DNA, 21 bp, Artificial Sequence
  Description of Artificial Sequence: Synthetic probe
ctggtagcgtggtcaggcttg

SEQ ID NO: 1619 - DNA, 25 bp, Artificial Sequence
  Description of Artificial Sequence: Synthetic probe
acttccagctttatccagacctttc

SEQ ID NO: 1620 - DNA, 17 bp, Artificial Sequence
  Description of Artificial Sequence: Synthetic probe
tgcgtgccacagcagga

SEQ ID NO: 1621 - DNA, 21 bp, Artificial Sequence
  Description of Artificial Sequence: Synthetic probe
ggaaaggtgagacaccgaggc

SEQ ID NO: 1622 - DNA, 28 bp, Artificial Sequence
  Description of Artificial Sequence: Synthetic probe
ttgcaataaagtggttttctgaacggga

SEQ ID NO: 1623 - DNA, 32 bp, Artificial Sequence
  Description of Artificial Sequence: Synthetic probe
agtcactatcattccatttggtagtaaacatt

SEQ ID NO: 1624 - DNA, 30 bp, Artificial Sequence
  Description of Artificial Sequence: Synthetic probe
aatattttagaaagggacaacagttaagct

SEQ ID NO: 1625 - DNA, 28 bp, Artificial Sequence
  Description of Artificial Sequence: Synthetic probe
agtcctgtacttctggatctttaaccat

SEQ ID NO: 1626 - DNA, 26 bp, Artificial Sequence
  Description of Artificial Sequence: Synthetic probe
tagacacaggtagaagactgcactat

SEQ ID NO: 1627 - DNA, 28 bp, Artificial Sequence
  Description of Artificial Sequence: Synthetic probe
tacttgttctggtacacagtcatggttg

SEQ ID NO: 1628 - DNA, 33 bp, Artificial Sequence
  Description of Artificial Sequence: Synthetic probe
acagatactcatcctcaatgtgattacttttta

SEQ ID NO: 1629 - DNA, 30 bp, Artificial Sequence
  Description of Artificial Sequence: Synthetic probe
aaataataagcatcagcatttgactttacc

SEQ ID NO: 1630 - DNA, 35 bp, Artificial Sequence
  Description of Artificial Sequence: Synthetic probe
tggatcatactgctaaacactaatataacctttgg

SEQ ID NO: 1631 - DNA, 32 bp, Artificial Sequence
  Description of Artificial Sequence: Synthetic probe
aaaattcaatcagcggtataatcaggagtttt

SEQ ID NO: 1632 - DNA, 29 bp, Artificial Sequence
  Description of Artificial Sequence: Synthetic probe
gtaacaccaatagggttcagcaaatcttc

SEQ ID NO: 1633 - DNA, 35 bp, Artificial Sequence
  Description of Artificial Sequence: Synthetic probe
attgatacttaataaactcagtgatttgccttacc

SEQ ID NO: 1634 - DNA, 28 bp, Artificial Sequence
  Description of Artificial Sequence: Synthetic probe
gaaacagagaatctccattttagcactt

SEQ ID NO: 1635 - DNA, 30 bp, Artificial Sequence
  Description of Artificial Sequence: Synthetic probe
ttatgtggactttctgagagaaaacaattt

SEQ ID NO: 1636 - DNA, 31 bp, Artificial Sequence
  Description of Artificial Sequence: Synthetic probe
ttacctgtactagctgaattaaatactgaga

SEQ ID NO: 1637 - DNA, 28 bp, Artificial Sequence
  Description of Artificial Sequence: Synthetic probe
ctcttccagccaaacataaacaaaagta

SEQ ID NO: 1638 - DNA, 27 bp, Artificial Sequence
  Description of Artificial Sequence: Synthetic probe
ggctaactgttttattgtgcatctcag

SEQ ID NO: 1639 - DNA, 29 bp, Artificial Sequence
  Description of Artificial Sequence: Synthetic probe
agtgaaaagagtctcaaacacaaactaga

SEQ ID NO: 1640 - DNA, 32 bp, Artificial Sequence
  Description of Artificial Sequence: Synthetic probe
gagagagagaagcataaattattgaacattct

SEQ ID NO: 1641 - DNA, 33 bp, Artificial Sequence
  Description of Artificial Sequence: Synthetic probe
ggttcataaatatcctgtgtataaaaagatagc

SEQ ID NO: 1642 - DNA, 25 bp, Artificial Sequence
  Description of Artificial Sequence: Synthetic probe
caggttgccttactggttacctacc

SEQ ID NO: 1643 - DNA, 28 bp, Artificial Sequence
  Description of Artificial Sequence: Synthetic probe
accgacagactcatctaacaaaaactta

SEQ ID NO: 1644 - DNA, 30 bp, Artificial Sequence
  Description of Artificial Sequence: Synthetic probe
tgatgttactattgtgacgatctccaattc

SEQ ID NO: 1645 - DNA, 29 bp, Artificial Sequence
  Description of Artificial Sequence: Synthetic probe
attgattgtttctaatagagcagccagaa

SEQ ID NO: 1646 - DNA, 25 bp, Artificial Sequence
  Description of Artificial Sequence: Synthetic probe
agagccaagcatcattgagaaaaga

SEQ ID NO: 1647 - DNA, 28 bp, Artificial Sequence
  Description of Artificial Sequence: Synthetic probe
ctgctgagagttattaacagtgcagtgt

SEQ ID NO: 1648 - DNA, 24 bp, Artificial Sequence
  Description of Artificial Sequence: Synthetic probe
aacgttgaaccattgtgtctcaca

SEQ ID NO: 1649 - DNA, 25 bp, Artificial Sequence
  Description of Artificial Sequence: Synthetic probe
caagtgaaacgtgtttgtcaagtca

SEQ ID NO: 1650 - DNA, 33 bp, Artificial Sequence
  Description of Artificial Sequence: Synthetic probe
gctaaatgtttgacttcaggatatggtttgaat

SEQ ID NO: 1651 - DNA, 30 bp, Artificial Sequence
  Description of Artificial Sequence: Synthetic probe
gctagggactttattttgtttttgtattgt

SEQ ID NO: 1652 - DNA, 23 bp, Artificial Sequence
  Description of Artificial Sequence: Synthetic probe
atgaagcacagcaaagtgaaggg

SEQ ID NO: 1653 - DNA, 19 bp, Artificial Sequence
  Description of Artificial Sequence: Synthetic probe
cccagacacgggcagtcac

SEQ ID NO: 1654 - DNA, 20 bp, Artificial Sequence
  Description of Artificial Sequence: Synthetic probe
gaccctcttctccgtccacg

SEQ ID NO: 1655 - DNA, 30 bp, Artificial Sequence
  Description of Artificial Sequence: Synthetic probe
agagtgagacgctgtctgaaaataataatt

SEQ ID NO: 1656 - DNA, 32 bp, Artificial Sequence
  Description of Artificial Sequence: Synthetic probe
ctgggaacatttgtcatttattcttttctact

SEQ ID NO: 1657 - DNA, 29 bp, Artificial Sequence
  Description of Artificial Sequence: Synthetic probe
tgtgatcgtatttctaatccctttcactc

SEQ ID NO: 1658 - DNA, 32 bp, Artificial Sequence
  Description of Artificial Sequence: Synthetic probe
tccactctgtctttattaggaagtaactgtga

SEQ ID NO: 1659 - DNA, 30 bp, Artificial Sequence
  Description of Artificial Sequence: Synthetic probe
tggatgttgtaacttgagctgtgtaattcc

SEQ ID NO: 1660 - DNA, 24 bp, Artificial Sequence
  Description of Artificial Sequence: Synthetic probe
ggtctctcactgaacacaccatgc

SEQ ID NO: 1661 - DNA, 30 bp, Artificial Sequence
  Description of Artificial Sequence: Synthetic probe
ttcagctctgaaacatcacacatctaagat

SEQ ID NO: 1662 - DNA, 32 bp, Artificial Sequence
  Description of Artificial Sequence: Synthetic probe
ctgatagcatgggtccgtttttaataaatatg

SEQ ID NO: 1663 - DNA, 31 bp, Artificial Sequence
  Description of Artificial Sequence: Synthetic probe
gctgaatacttgatttgtttcttgtaactga

SEQ ID NO: 1664 - DNA, 21 bp, Artificial Sequence
  Description of Artificial Sequence: Synthetic probe
cctggagggaactttcccagt

SEQ ID NO: 1665 - DNA, 23 bp, Artificial Sequence
  Description of Artificial Sequence: Synthetic probe
caggctaccctgagactgaccac

SEQ ID NO: 1666 - DNA, 21 bp, Artificial Sequence
  Description of Artificial Sequence: Synthetic probe
ttctaacccaccctcaccctc

SEQ ID NO: 1667 - DNA, 19 bp, Artificial Sequence
  Description of Artificial Sequence: Synthetic probe
ggcactacgaggcccagca

SEQ ID NO: 1668 - DNA, 27 bp, Artificial Sequence
  Description of Artificial Sequence: Synthetic probe
atggacaagaacacttttaacatggaa

SEQ ID NO: 1669 - DNA, 19 bp, Artificial Sequence
  Description of Artificial Sequence: Synthetic probe
cctgtcacagcgcgtgttc

SEQ ID NO: 1670 - DNA, 23 bp, Artificial Sequence
  Description of Artificial Sequence: Synthetic probe
aggtgaagtccagcaacctgatc

SEQ ID NO: 1671 - DNA, 20 bp, Artificial Sequence
  Description of Artificial Sequence: Synthetic probe
ccactgaccactgtgtgccc

SEQ ID NO: 1672 - DNA, 21 bp, Artificial Sequence
  Description of Artificial Sequence: Synthetic probe
cgtggtgttggcctgcacatt

SEQ ID NO: 1673 - DNA, 20 bp, Artificial Sequence
  Description of Artificial Sequence: Synthetic probe
tctaccctgggctgctccta

SEQ ID NO: 1674 - DNA, 23 bp, Artificial Sequence
  Description of Artificial Sequence: Synthetic probe
aggcctctgttcttcccgttttt

SEQ ID NO: 1675 - DNA, 31 bp, Artificial Sequence
  Description of Artificial Sequence: Synthetic probe
taatgtgttacaatcatttgccatttctagg

SEQ ID NO: 1676 - DNA, 29 bp, Artificial Sequence
  Description of Artificial Sequence: Synthetic probe
ctacacaggagtttcagtaacgtgaagta

SEQ ID NO: 1677 - DNA, 21 bp, Artificial Sequence
  Description of Artificial Sequence: Synthetic probe
tccaggaagagtcagtggtgc

SEQ ID NO: 1678 - DNA, 21 bp, Artificial Sequence
  Description of Artificial Sequence: Synthetic probe
caagggacctgctctcccagt

SEQ ID NO: 1679 - DNA, 26 bp, Artificial Sequence
  Description of Artificial Sequence: Synthetic probe
atgaaagcaccatttccctgtttcag

SEQ ID NO: 1680 - DNA, 24 bp, Artificial Sequence
  Description of Artificial Sequence: Synthetic probe
ggcatgttggtgacctctgaattt

SEQ ID NO: 1681 - DNA, 19 bp, Artificial Sequence
  Description of Artificial Sequence: Synthetic probe
tccagtgcagctctcagcg

SEQ ID NO: 1682 - DNA, 28 bp, Artificial Sequence
  Description of Artificial Sequence: Synthetic probe
gaatcatctgaattgcatctcgcatgtc

SEQ ID NO: 1683 - DNA, 28 bp, Artificial Sequence
  Description of Artificial Sequence: Synthetic probe
agaatcacaacacattctaatgttcggc

SEQ ID NO: 1684 - DNA, 23 bp, Artificial Sequence
  Description of Artificial Sequence: Synthetic probe
ggcttgtggaagtgttcattgca

SEQ ID NO: 1685 - DNA, 21 bp, Artificial Sequence
  Description of Artificial Sequence: Synthetic probe
gccttcccttggactgtgctg

SEQ ID NO: 1686 - DNA, 28 bp, Artificial Sequence
  Description of Artificial Sequence: Synthetic probe
cttaatgcactggattttaacaaggcat

SEQ ID NO: 1687 - DNA, 32 bp, Artificial Sequence
  Description of Artificial Sequence: Synthetic probe
tcttttcatggtctcgtctcctaatttctttt

SEQ ID NO: 1688 - DNA, 35 bp, Artificial Sequence
  Description of Artificial Sequence: Synthetic probe
tatctttacccttgtttgattattacacctttgga

SEQ ID NO: 1689 - DNA, 32 bp, Artificial Sequence
  Description of Artificial Sequence: Synthetic probe
cgaatttgcactaattttcttattacagtgag

SEQ ID NO: 1690 - DNA, 32 bp, Artificial Sequence
  Description of Artificial Sequence: Synthetic probe
taaaacatgagtttgcagtgattttgctattc

SEQ ID NO: 1691 - DNA, 23 bp, Artificial Sequence
  Description of Artificial Sequence: Synthetic probe
tcactcctcccttctgcttcgtc

SEQ ID NO: 1692 - DNA, 19 bp, Artificial Sequence
  Description of Artificial Sequence: Synthetic probe
ccggaccgggactatctgc

SEQ ID NO: 1693 - DNA, 18 bp, Artificial Sequence
  Description of Artificial Sequence: Synthetic probe
agcgtcctcgcaagccga

SEQ ID NO: 1694 - DNA, 20 bp, Artificial Sequence
  Description of Artificial Sequence: Synthetic probe
ctatggtgagtgcagccagc

SEQ ID NO: 1695 - DNA, 21 bp, Artificial Sequence
  Description of Artificial Sequence: Synthetic probe
gtgaccctgacaggtcctgcc

SEQ ID NO: 1696 - DNA, 20 bp, Artificial Sequence
  Description of Artificial Sequence: Synthetic probe
gggcaagttagccagcctca

SEQ ID NO: 1697 - DNA, 20 bp, Artificial Sequence
  Description of Artificial Sequence: Synthetic probe
ctgcctggtgcctacatcca

SEQ ID NO: 1698 - DNA, 24 bp, Artificial Sequence
  Description of Artificial Sequence: Synthetic probe
cttcccaacagtcatggtaatccc

SEQ ID NO: 1699 - DNA, 20 bp, Artificial Sequence
  Description of Artificial Sequence: Synthetic probe
cttctttgcggcgctgacag

SEQ ID NO: 1700 - DNA, 24 bp, Artificial Sequence
  Description of Artificial Sequence: Synthetic probe
cagctccaggaccactctgttttc

SEQ ID NO: 1701 - DNA, 19 bp, Artificial Sequence
  Description of Artificial Sequence: Synthetic probe
gccctgtctccctcaggtg

SEQ ID NO: 1702 - DNA, 23 bp, Artificial Sequence
  Description of Artificial Sequence: Synthetic probe
gtccctctccctcttctcccttc

SEQ ID NO: 1703 - DNA, 19 bp, Artificial Sequence
  Description of Artificial Sequence: Synthetic probe
tgcccagcctgtcatccct

SEQ ID NO: 1704 - DNA, 20 bp, Artificial Sequence
  Description of Artificial Sequence: Synthetic probe
cacacaagccctgagcctga

SEQ ID NO: 1705 - DNA, 21 bp, Artificial Sequence
  Description of Artificial Sequence: Synthetic probe
ctttgaccaggactgggcttc

SEQ ID NO: 1706 - DNA, 24 bp, Artificial Sequence
  Description of Artificial Sequence: Synthetic probe
gtctccagcttagttgctacatcc

SEQ ID NO: 1707 - DNA, 19 bp, Artificial Sequence
  Description of Artificial Sequence: Synthetic probe
ccagctcagcccttggagt

SEQ ID NO: 1708 - DNA, 19 bp, Artificial Sequence
  Description of Artificial Sequence: Synthetic probe
cagactggagacgcccagg

SEQ ID NO: 1709 - DNA, 24 bp, Artificial Sequence
  Description of Artificial Sequence: Synthetic probe
gtctccagcttagttgctacatcc

SEQ ID NO: 1710 - DNA, 25 bp, Artificial Sequence
  Description of Artificial Sequence: Synthetic probe
ccaccagctaatagaaccctatcct

SEQ ID NO: 1711 - DNA, 21 bp, Artificial Sequence
  Description of Artificial Sequence: Synthetic probe
ccagaagggcagagagggctt

SEQ ID NO: 1712 - DNA, 26 bp, Artificial Sequence
  Description of Artificial Sequence: Synthetic probe
tgtcatccactctctacctcttccag

SEQ ID NO: 1713 - DNA, 19 bp, Artificial Sequence
  Description of Artificial Sequence: Synthetic probe
cctgacggatgtggtgcct

SEQ ID NO: 1714 - DNA, 22 bp, Artificial Sequence
  Description of Artificial Sequence: Synthetic probe
ccttctgacccactgggctctg

SEQ ID NO: 1715 - DNA, 23 bp, Artificial Sequence
  Description of Artificial Sequence: Synthetic probe
agcttcatccagccttcattccc

SEQ ID NO: 1716 - DNA, 19 bp, Artificial Sequence
  Description of Artificial Sequence: Synthetic probe
cctgacggatgtggtgcct

SEQ ID NO: 1717 - DNA, 23 bp, Artificial Sequence
  Description of Artificial Sequence: Synthetic probe
tccctgctctgctcaggtgattc

SEQ ID NO: 1718 - DNA, 20 bp, Artificial Sequence
  Description of Artificial Sequence: Synthetic probe
ctcccttgtgacctgagggc

SEQ ID NO: 1719 - DNA, 21 bp, Artificial Sequence
  Description of Artificial Sequence: Synthetic probe
ctctgggaatcggcgtggatg

SEQ ID NO: 1720 - DNA, 20 bp, Artificial Sequence
  Description of Artificial Sequence: Synthetic probe
ccctgagactgccctttccc

SEQ ID NO: 1721 - DNA, 20 bp, Artificial Sequence
  Description of Artificial Sequence: Synthetic probe
ggtactgctggtggccctgg

SEQ ID NO: 1722 - DNA, 20 bp, Artificial Sequence
  Description of Artificial Sequence: Synthetic probe
tgtttgggccagctctgacc

SEQ ID NO: 1723 - DNA, 19 bp, Artificial Sequence
  Description of Artificial Sequence: Synthetic probe
cccacctccaaccagtgcc

SEQ ID NO: 1724 - DNA, 20 bp, Artificial Sequence
  Description of Artificial Sequence: Synthetic probe
tgtttgggccagctctgacc

SEQ ID NO: 1725 - DNA, 21 bp, Artificial Sequence
  Description of Artificial Sequence: Synthetic probe
ctgtgtgaccatgctgcggtg

SEQ ID NO: 1726 - DNA, 25 bp, Artificial Sequence
  Description of Artificial Sequence: Synthetic probe
tgactatcagacacatgacattggc

SEQ ID NO: 1727 - DNA, 23 bp, Artificial Sequence
  Description of Artificial Sequence: Synthetic probe
gacactcagttatccacggccag

SEQ ID NO: 1728 - DNA, 22 bp, Artificial Sequence
  Description of Artificial Sequence: Synthetic probe
gcagagcaccttcttgctgatg

SEQ ID NO: 1729 - DNA, 23 bp, Artificial Sequence
  Description of Artificial Sequence: Synthetic probe
gacactcagttatccacggccag

SEQ ID NO: 1730 - DNA, 21 bp, Artificial Sequence
  Description of Artificial Sequence: Synthetic probe
gtccctgaccctcaccaacta

SEQ ID NO: 1731 - DNA, 25 bp, Artificial Sequence
  Description of Artificial Sequence: Synthetic probe
actttttctgtagcgtgggaggact

SEQ ID NO: 1732 - DNA, 23 bp, Artificial Sequence
  Description of Artificial Sequence: Synthetic probe
ctttctctgtttgctctggcagt

SEQ ID NO: 1733 - DNA, 24 bp, Artificial Sequence
  Description of Artificial Sequence: Synthetic probe
ctattgcaggtcctgggatttgaa

SEQ ID NO: 1734 - DNA, 23 bp, Artificial Sequence
  Description of Artificial Sequence: Synthetic probe
ctttctctgtttgctctggcagt

SEQ ID NO: 1735 - DNA, 20 bp, Artificial Sequence
  Description of Artificial Sequence: Synthetic probe
ttgcagtgatgcctggctga

SEQ ID NO: 1736 - DNA, 20 bp, Artificial Sequence
  Description of Artificial Sequence: Synthetic probe
tgggagcgcccagataacgc

SEQ ID NO: 1737 - DNA, 31 bp, Artificial Sequence
  Description of Artificial Sequence: Synthetic probe
cgttctaagagagtgacagaaaggtaaagag

SEQ ID NO: 1738 - DNA, 35 bp, Artificial Sequence
  Description of Artificial Sequence: Synthetic probe
gtggcttagaaatcttttctaaatgaaaacacaac

SEQ ID NO: 1739 - DNA, 33 bp, Artificial Sequence
  Description of Artificial Sequence: Synthetic probe
cactctaacaagcagataactttcacttaatag

SEQ ID NO: 1740 - DNA, 28 bp, Artificial Sequence
  Description of Artificial Sequence: Synthetic probe
tgacagtaagatacagtctatcgggttt

SEQ ID NO: 1741 - DNA, 27 bp, Artificial Sequence
  Description of Artificial Sequence: Synthetic probe
tttgataagttctagctgtggtgggtt

SEQ ID NO: 1742 - DNA, 28 bp, Artificial Sequence
  Description of Artificial Sequence: Synthetic probe
aaattctcagatccaggaagaggaaagg

SEQ ID NO: 1743 - DNA, 28 bp, Artificial Sequence
  Description of Artificial Sequence: Synthetic probe
ggaaggatgagaatttcaagcacttact

SEQ ID NO: 1744 - DNA, 30 bp, Artificial Sequence
  Description of Artificial Sequence: Synthetic probe
ctgtccttattttggatatttctcccaatg

SEQ ID NO: 1745 - DNA, 30 bp, Artificial Sequence
  Description of Artificial Sequence: Synthetic probe
ggtcctggtatgaagaatgtatttacccaa

SEQ ID NO: 1746 - DNA, 31 bp, Artificial Sequence
  Description of Artificial Sequence: Synthetic probe
ttaaacacacatcacatacatacaagtcaac

SEQ ID NO: 1747 - DNA, 29 bp, Artificial Sequence
  Description of Artificial Sequence: Synthetic probe
agtttattttcatggtgttttatccctct

SEQ ID NO: 1748 - DNA, 18 bp, Artificial Sequence
  Description of Artificial Sequence: Synthetic probe
taaccgaacgcggcggtg

SEQ ID NO: 1749 - DNA, 29 bp, Artificial Sequence
  Description of Artificial Sequence: Synthetic probe
accacttcctacctagaaaacactctcag

SEQ ID NO: 1750 - DNA, 21 bp, Artificial Sequence
  Description of Artificial Sequence: Synthetic probe
gggagcagcagactttgtggt

SEQ ID NO: 1751 - DNA, 29 bp, Artificial Sequence
  Description of Artificial Sequence: Synthetic probe
gaaaaatcacccaaaggtaacatcttgcc

SEQ ID NO: 1752 - DNA, 23 bp, Artificial Sequence
  Description of Artificial Sequence: Synthetic probe
gcttgagctttccaatctgctca

SEQ ID NO: 1753 - DNA, 33 bp, Artificial Sequence
  Description of Artificial Sequence: Synthetic probe
tctcctccactaaaaataggatataacaactca

SEQ ID NO: 1754 - DNA, 30 bp, Artificial Sequence
  Description of Artificial Sequence: Synthetic probe
ggaatcaaaatctccaagagtgactattac

SEQ ID NO: 1755 - DNA, 28 bp, Artificial Sequence
  Description of Artificial Sequence: Synthetic probe
taggctagaaatgtatggtcagaaaaca

SEQ ID NO: 1756 - DNA, 30 bp, Artificial Sequence
  Description of Artificial Sequence: Synthetic probe
ttagcagaaaagaagtttctgtgatttacc

SEQ ID NO: 1757 - DNA, 25 bp, Artificial Sequence
  Description of Artificial Sequence: Synthetic probe
accatcaacagttcccaaagtctct

SEQ ID NO: 1758 - DNA, 20 bp, Artificial Sequence
  Description of Artificial Sequence: Synthetic probe
ggagacagggacaggctgtg

SEQ ID NO: 1759 - DNA, 30 bp, Artificial Sequence
  Description of Artificial Sequence: Synthetic probe
ttcgtgagcactttccttccataaactaaa

SEQ ID NO: 1760 - DNA, 26 bp, Artificial Sequence
  Description of Artificial Sequence: Synthetic probe
ctagcaagagaatgagaatccgcatg

SEQ ID NO: 1761 - DNA, 27 bp, Artificial Sequence
  Description of Artificial Sequence: Synthetic probe
caggtaaaaagaatttccttcagcact

SEQ ID NO: 1762 - DNA, 25 bp, Artificial Sequence
  Description of Artificial Sequence: Synthetic probe
gtgctgaagttttggcaggttttct

SEQ ID NO: 1763 - DNA, 21 bp, Artificial Sequence
  Description of Artificial Sequence: Synthetic probe
ctgctctgggtcctcctcagg

SEQ ID NO: 1764 - DNA, 24 bp, Artificial Sequence
  Description of Artificial Sequence: Synthetic probe
agaacccagaatcctgtcaccatt

SEQ ID NO: 1765 - DNA, 28 bp, Artificial Sequence
  Description of Artificial Sequence: Synthetic probe
tctgacataatgcagtaaaatcaggttc

SEQ ID NO: 1766 - DNA, 35 bp, Artificial Sequence
  Description of Artificial Sequence: Synthetic probe
cctctgggtaatggaattattattagcttttattg

SEQ ID NO: 1767 - DNA, 32 bp, Artificial Sequence
  Description of Artificial Sequence: Synthetic probe
ccttttatggcagaggcttatatttatacaag

SEQ ID NO: 1768 - DNA, 33 bp, Artificial Sequence
  Description of Artificial Sequence: Synthetic probe
tcccagaatctaattgtgaacaatgacataaaa

SEQ ID NO: 1769 - DNA, 31 bp, Artificial Sequence
  Description of Artificial Sequence: Synthetic probe
gtgaaaaataacattctgtgaactacttacg

SEQ ID NO: 1770 - DNA, 32 bp, Artificial Sequence
  Description of Artificial Sequence: Synthetic probe
gggaatttagtccaaaggaatgccaatttaat

SEQ ID NO: 1771 - DNA, 32 bp, Artificial Sequence
  Description of Artificial Sequence: Synthetic probe
aataagcaactgctgaatgagaaagtaaaagg

SEQ ID NO: 1772 - DNA, 32 bp, Artificial Sequence
  Description of Artificial Sequence: Synthetic probe
tgttagggagaacttacatctaaatctacttt

SEQ ID NO: 1773 - DNA, 25 bp, Artificial Sequence
  Description of Artificial Sequence: Synthetic probe
cctccctccacagtctcaaaacatt

SEQ ID NO: 1774 - DNA, 32 bp, Artificial Sequence
  Description of Artificial Sequence: Synthetic probe
gcaaatcaatcaaatataccatgtgcaatacc

SEQ ID NO: 1775 - DNA, 32 bp, Artificial Sequence
  Description of Artificial Sequence: Synthetic probe
caaatctgaaacactataaagccatgaataac

SEQ ID NO: 1776 - DNA, 33 bp, Artificial Sequence
  Description of Artificial Sequence: Synthetic probe
gttaaaataggaaatcagattttctgaaggttg

SEQ ID NO: 1777 - DNA, 30 bp, Artificial Sequence
  Description of Artificial Sequence: Synthetic probe
cttaaaagtagccagagagaaaaagacaga

SEQ ID NO: 1778 - DNA, 29 bp, Artificial Sequence
  Description of Artificial Sequence: Synthetic probe
acgaactggaaagatgctgcttttaatat

SEQ ID NO: 1779 - DNA, 18 bp, Artificial Sequence
  Description of Artificial Sequence: Synthetic probe
ccgcgcccggctgaaatt

SEQ ID NO: 1780 - DNA, 30 bp, Artificial Sequence
  Description of Artificial Sequence: Synthetic probe
ccaaagaaacacaccacattttaactttaa

SEQ ID NO: 1781 - DNA, 30 bp, Artificial Sequence
  Description of Artificial Sequence: Synthetic probe
gaaagacaaatctgttccagaatcaagatt

SEQ ID NO: 1782 - DNA, 33 bp, Artificial Sequence
  Description of Artificial Sequence: Synthetic probe
aagaaacacctctcactaacaataatttgttag

SEQ ID NO: 1783 - DNA, 29 bp, Artificial Sequence
  Description of Artificial Sequence: Synthetic probe
tgcttaaaatctatttgcagtttgaatgg

SEQ ID NO: 1784 - DNA, 30 bp, Artificial Sequence
  Description of Artificial Sequence: Synthetic probe
tttcagagtccatgctcttgaaaataatca

SEQ ID NO: 1785 - DNA, 26 bp, Artificial Sequence
  Description of Artificial Sequence: Synthetic probe
aagtagggaggagagaaggtgaagtg

SEQ ID NO: 1786 - DNA, 33 bp, Artificial Sequence
  Description of Artificial Sequence: Synthetic probe
gagatcaaatgaattacctatgttatgttatgg

SEQ ID NO: 1787 - DNA, 35 bp, Artificial Sequence
  Description of Artificial Sequence: Synthetic probe
tgcatgaagaccgagttatagaatactataataga

SEQ ID NO: 1788 - DNA, 33 bp, Artificial Sequence
  Description of Artificial Sequence: Synthetic probe
ctcattctttactacttccctaaagagaaaaca

SEQ ID NO: 1789 - DNA, 32 bp, Artificial Sequence
  Description of Artificial Sequence: Synthetic probe
gaggtgtttgaataactgcatttggaaattca

SEQ ID NO: 1790 - DNA, 25 bp, Artificial Sequence
  Description of Artificial Sequence: Synthetic probe
tcggctactggaaaacattcaaaac

SEQ ID NO: 1791 - DNA, 29 bp, Artificial Sequence
  Description of Artificial Sequence: Synthetic probe
cgaaaagacttcttgcagtgtaaacaatt

SEQ ID NO: 1792 - DNA, 28 bp, Artificial Sequence
  Description of Artificial Sequence: Synthetic probe
catctgtgagagacaatgaatccagagg

SEQ ID NO: 1793 - DNA, 21 bp, Artificial Sequence
  Description of Artificial Sequence: Synthetic probe
agaaaggcgcttctgaacgcg

SEQ ID NO: 1794 - DNA, 19 bp, Artificial Sequence
  Description of Artificial Sequence: Synthetic probe
ggacgtacagcaagggcgt

SEQ ID NO: 1795 - DNA, 20 bp, Artificial Sequence
  Description of Artificial Sequence: Synthetic probe
tgataagggcggcttgagga

SEQ ID NO: 1796 - DNA, 19 bp, Artificial Sequence
  Description of Artificial Sequence: Synthetic probe
cactcgccctcacgaaggg

SEQ ID NO: 1797 - DNA, 20 bp, Artificial Sequence
  Description of Artificial Sequence: Synthetic probe
gcaagaccagcagtagcagg

SEQ ID NO: 1798 - DNA, 19 bp, Artificial Sequence
  Description of Artificial Sequence: Synthetic probe
cgtgctcacctccaggctg

SEQ ID NO: 1799 - DNA, 22 bp, Artificial Sequence
  Description of Artificial Sequence: Synthetic probe
acactgggtagaccacagcacg

SEQ ID NO: 1800 - DNA, 21 bp, Artificial Sequence
  Description of Artificial Sequence: Synthetic probe
gcgagcacctcatttcctggg

SEQ ID NO: 1801 - DNA, 26 bp, Artificial Sequence
  Description of Artificial Sequence: Synthetic probe
ccatgtcccttggcctttcaatcttc

SEQ ID NO: 1802 - DNA, 20 bp, Artificial Sequence
  Description of Artificial Sequence: Synthetic probe
ctccctggagcaggcactca

SEQ ID NO: 1803 - DNA, 19 bp, Artificial Sequence
  Description of Artificial Sequence: Synthetic probe
cctcccttgggcgtttcca

SEQ ID NO: 1804 - DNA, 25 bp, Artificial Sequence
  Description of Artificial Sequence: Synthetic probe
atgccctgattaaaccctgcttacg

SEQ ID NO: 1805 - DNA, 20 bp, Artificial Sequence
  Description of Artificial Sequence: Synthetic probe
ctgggaggtggtggtggtcc

SEQ ID NO: 1806 - DNA, 21 bp, Artificial Sequence
  Description of Artificial Sequence: Synthetic probe
acagcagcaccgagacgatga

SEQ ID NO: 1807 - DNA, 19 bp, Artificial Sequence
  Description of Artificial Sequence: Synthetic probe
tggcctccctccctggaag

SEQ ID NO: 1808 - DNA, 18 bp, Artificial Sequence
  Description of Artificial Sequence: Synthetic probe
actgtgcctgtgcctggc

SEQ ID NO: 1809 - DNA, 18 bp, Artificial Sequence
  Description of Artificial Sequence: Synthetic probe
tgcccacctcaccctgca

SEQ ID NO: 1810 - DNA, 20 bp, Artificial Sequence
  Description of Artificial Sequence: Synthetic probe
ggctgggtgcagagccatat

SEQ ID NO: 1811 - DNA, 19 bp, Artificial Sequence
  Description of Artificial Sequence: Synthetic probe
ttcccaagggcactgcctg

SEQ ID NO: 1812 - DNA, 22 bp, Artificial Sequence
  Description of Artificial Sequence: Synthetic probe
ggtgtttctgtaacctccaccc

SEQ ID NO: 1813 - DNA, 20 bp, Artificial Sequence
  Description of Artificial Sequence: Synthetic probe
cccaagtgaggctgggccaa

SEQ ID NO: 1814 - DNA, 23 bp, Artificial Sequence
  Description of Artificial Sequence: Synthetic probe
cagcttgtgggaattggacccag

SEQ ID NO: 1815 - DNA, 27 bp, Artificial Sequence
  Description of Artificial Sequence: Synthetic probe
tttaaaaagcatcacagagaggaagga

SEQ ID NO: 1816 - DNA, 31 bp, Artificial Sequence
  Description of Artificial Sequence: Synthetic probe
ttgtgagtccattacctttcacaaagaaatg

SEQ ID NO: 1817 - DNA, 18 bp, Artificial Sequence
  Description of Artificial Sequence: Synthetic probe
cgagggcagccacagcaa

SEQ ID NO: 1818 - DNA, 24 bp, Artificial Sequence
  Description of Artificial Sequence: Synthetic probe
tactcacttccgctccgttctctt

SEQ ID NO: 1819 - DNA, 32 bp, Artificial Sequence
  Description of Artificial Sequence: Synthetic probe
cccactttacatataattgacctttctgattc

SEQ ID NO: 1820 - DNA, 23 bp, Artificial Sequence
  Description of Artificial Sequence: Synthetic probe
ttcgaactttctccctggtcaca

SEQ ID NO: 1821 - DNA, 22 bp, Artificial Sequence
  Description of Artificial Sequence: Synthetic probe
gatctcttccctccctccttcc

SEQ ID NO: 1822 - DNA, 21 bp, Artificial Sequence
  Description of Artificial Sequence: Synthetic probe
ggccaccaacctcattctgtt

SEQ ID NO: 1823 - DNA, 24 bp, Artificial Sequence
  Description of Artificial Sequence: Synthetic probe
ctgcatttgtcctttgactggtgt

SEQ ID NO: 1824 - DNA, 19 bp, Artificial Sequence
  Description of Artificial Sequence: Synthetic probe
gcatggtggaggtgctggc

SEQ ID NO: 1825 - DNA, 20 bp, Artificial Sequence
  Description of Artificial Sequence: Synthetic probe
aggagctgtttgcagggtcc

SEQ ID NO: 1826 - DNA, 30 bp, Artificial Sequence
  Description of Artificial Sequence: Synthetic probe
tgctaaaaagtgtaagaagaaatgagctag

SEQ ID NO: 1827 - DNA, 25 bp, Artificial Sequence
  Description of Artificial Sequence: Synthetic probe
ccttcagaagagggtgcattttcag

SEQ ID NO: 1828 - DNA, 26 bp, Artificial Sequence
  Description of Artificial Sequence: Synthetic probe
tgtctatggcacatcaaactatgcac

SEQ ID NO: 1829 - DNA, 29 bp, Artificial Sequence
  Description of Artificial Sequence: Synthetic probe
atctgccaccatagagggtatagaaaaac

SEQ ID NO: 1830 - DNA, 29 bp, Artificial Sequence
  Description of Artificial Sequence: Synthetic probe
aattgaaacactattgagatccttttccc

SEQ ID NO: 1831 - DNA, 28 bp, Artificial Sequence
  Description of Artificial Sequence: Synthetic probe
aaaaaaacagagaggataggacaaaaca

SEQ ID NO: 1832 - DNA, 27 bp, Artificial Sequence
  Description of Artificial Sequence: Synthetic probe
ggaaaactcaacttgctgactacatct

SEQ ID NO: 1833 - DNA, 26 bp, Artificial Sequence
  Description of Artificial Sequence: Synthetic probe
gtaaatccattctgctgctgtcctgg

SEQ ID NO: 1834 - DNA, 33 bp, Artificial Sequence
  Description of Artificial Sequence: Synthetic probe
caaagccctaccaaaaaaaaaaaaaaaatagcc

SEQ ID NO: 1835 - DNA, 30 bp, Artificial Sequence
  Description of Artificial Sequence: Synthetic probe
tttgtgcgtttcaatcaccactaaatcaat

SEQ ID NO: 1836 - DNA, 33 bp, Artificial Sequence
  Description of Artificial Sequence: Synthetic probe
taaccttgaataaaagacaatgtactatgctca

SEQ ID NO: 1837 - DNA, 31 bp, Artificial Sequence
  Description of Artificial Sequence: Synthetic probe
tgtgcaaccttaggaagaaaaaagaaattac

SEQ ID NO: 1838 - DNA, 34 bp, Artificial Sequence
  Description of Artificial Sequence: Synthetic probe
ccagatttcaattcttttgacaacaaatagagct

SEQ ID NO: 1839 - DNA, 30 bp, Artificial Sequence
  Description of Artificial Sequence: Synthetic probe
actgctcaaagaaactaatcaactgagtaa

SEQ ID NO: 1840 - DNA, 25 bp, Artificial Sequence
  Description of Artificial Sequence: Synthetic probe
ttgtagtccaccatcctgataaggt

SEQ ID NO: 1841 - DNA, 20 bp, Artificial Sequence
  Description of Artificial Sequence: Synthetic probe
cccgatgaatggagacgcgc

SEQ ID NO: 1842 - DNA, 27 bp, Artificial Sequence
  Description of Artificial Sequence: Synthetic probe
aacaggtttacaaaccctcgtgaagac

SEQ ID NO: 1843 - DNA, 27 bp, Artificial Sequence
  Description of Artificial Sequence: Synthetic probe
caaccagttcttgagtctcagaaaaga

SEQ ID NO: 1844 - DNA, 24 bp, Artificial Sequence
  Description of Artificial Sequence: Synthetic probe
gagaactaaggcggaatcagcacg

SEQ ID NO: 1845 - DNA, 19 bp, Artificial Sequence
  Description of Artificial Sequence: Synthetic probe
agcccgactgccttgtacc

SEQ ID NO: 1846 - DNA, 20 bp, Artificial Sequence
  Description of Artificial Sequence: Synthetic probe
gggccaggaaggctccagtg

SEQ ID NO: 1847 - DNA, 24 bp, Artificial Sequence
  Description of Artificial Sequence: Synthetic probe
ggagatgagggagggagagactca

SEQ ID NO: 1848 - DNA, 20 bp, Artificial Sequence
  Description of Artificial Sequence: Synthetic probe
cctggaaagccaggtgcctg

SEQ ID NO: 1849 - DNA, 18 bp, Artificial Sequence
  Description of Artificial Sequence: Synthetic probe
agccgtgtgctgatgggc

SEQ ID NO: 1850 - DNA, 20 bp, Artificial Sequence
  Description of Artificial Sequence: Synthetic probe
caggcacacgttgtagcgca

SEQ ID NO: 1851 - DNA, 22 bp, Artificial Sequence
  Description of Artificial Sequence: Synthetic probe
ctttgctcacccaccagctcag

SEQ ID NO: 1852 - DNA, 20 bp, Artificial Sequence
  Description of Artificial Sequence: Synthetic probe
ctgcccaacccagagagcct

SEQ ID NO: 1853 - DNA, 20 bp, Artificial Sequence
  Description of Artificial Sequence: Synthetic probe
gaccagggtgaagagcgtgc

SEQ ID NO: 1854 - DNA, 23 bp, Artificial Sequence
  Description of Artificial Sequence: Synthetic probe
acacttcagccttcctccctgta

SEQ ID NO: 1855 - DNA, 21 bp, Artificial Sequence
  Description of Artificial Sequence: Synthetic probe
agagaggctggtaggtggtgc

SEQ ID NO: 1856 - DNA, 25 bp, Artificial Sequence
  Description of Artificial Sequence: Synthetic probe
gcaagtgcccagtatattttgttgc

SEQ ID NO: 1857 - DNA, 20 bp, Artificial Sequence
  Description of Artificial Sequence: Synthetic probe
ccaggacctcagaccgaagt

SEQ ID NO: 1858 - DNA, 20 bp, Artificial Sequence
  Description of Artificial Sequence: Synthetic probe
ttatggccttggctccagct

SEQ ID NO: 1859 - DNA, 20 bp, Artificial Sequence
  Description of Artificial Sequence: Synthetic probe
cccaaggctgagggtgaggc

SEQ ID NO: 1860 - DNA, 19 bp, Artificial Sequence
  Description of Artificial Sequence: Synthetic probe
aggcggctccggtagagga

SEQ ID NO: 1861 - DNA, 22 bp, Artificial Sequence
  Description of Artificial Sequence: Synthetic probe
cccactcttcagatcctctggg

SEQ ID NO: 1862 - DNA, 19 bp, Artificial Sequence
  Description of Artificial Sequence: Synthetic probe
gtcccaggtcctgctctgc

SEQ ID NO: 1863 - DNA, 18 bp, Artificial Sequence
  Description of Artificial Sequence: Synthetic probe
ggctggcatccttgggct

SEQ ID NO: 1864 - DNA, 19 bp, Artificial Sequence
  Description of Artificial Sequence: Synthetic probe
tggcgagaggaagggcctg

SEQ ID NO: 1865 - DNA, 20 bp, Artificial Sequence
  Description of Artificial Sequence: Synthetic probe
cccgctttgaagtcccacca

SEQ ID NO: 1866 - DNA, 21 bp, Artificial Sequence
  Description of Artificial Sequence: Synthetic probe
agacggtactcactcctcagc

SEQ ID NO: 1867 - DNA, 25 bp, Artificial Sequence
  Description of Artificial Sequence: Synthetic probe
actcacagaagactcagtatccgtt

SEQ ID NO: 1868 - DNA, 19 bp, Artificial Sequence
  Description of Artificial Sequence: Synthetic probe
cagctgaggctttgcccgc

SEQ ID NO: 1869 - DNA, 20 bp, Artificial Sequence
  Description of Artificial Sequence: Synthetic probe
gtggatgcctctcccgaggg

SEQ ID NO: 1870 - DNA, 19 bp, Artificial Sequence
  Description of Artificial Sequence: Synthetic probe
ctcatgctccctgccctgt

SEQ ID NO: 1871 - DNA, 20 bp, Artificial Sequence
  Description of Artificial Sequence: Synthetic probe
tgggtctgggtgcttgagga

SEQ ID NO: 1872 - DNA, 20 bp, Artificial Sequence
  Description of Artificial Sequence: Synthetic probe
ttcaatgagccgagccagcc

SEQ ID NO: 1873 - DNA, 22 bp, Artificial Sequence
  Description of Artificial Sequence: Synthetic probe
gaccacagacaggccatgagga

SEQ ID NO: 1874 - DNA, 22 bp, Artificial Sequence
  Description of Artificial Sequence: Synthetic probe
ccaagcgcgacataccacacag

SEQ ID NO: 1875 - DNA, 26 bp, Artificial Sequence
  Description of Artificial Sequence: Synthetic probe
gaccatcgagagagcctaacatcaga

SEQ ID NO: 1876 - DNA, 19 bp, Artificial Sequence
  Description of Artificial Sequence: Synthetic probe
agccgagaagccggtctgg

SEQ ID NO: 1877 - DNA, 21 bp, Artificial Sequence
  Description of Artificial Sequence: Synthetic probe
tggtagatgacctcggtggag

SEQ ID NO: 1878 - DNA, 20 bp, Artificial Sequence
  Description of Artificial Sequence: Synthetic probe
ccatcagcaccgtgactggc

SEQ ID NO: 1879 - DNA, 23 bp, Artificial Sequence
  Description of Artificial Sequence: Synthetic probe
cggtcccaacaccggaaaggata

SEQ ID NO: 1880 - DNA, 18 bp, Artificial Sequence
  Description of Artificial Sequence: Synthetic probe
aaaggagcctgccctgcc

SEQ ID NO: 1881 - DNA, 22 bp, Artificial Sequence
  Description of Artificial Sequence: Synthetic probe
cgcccaggtcggagattttgag

SEQ ID NO: 1882 - DNA, 19 bp, Artificial Sequence
  Description of Artificial Sequence: Synthetic probe
ctcggagtgtgcgtgtggt

SEQ ID NO: 1883 - DNA, 20 bp, Artificial Sequence
  Description of Artificial Sequence: Synthetic probe
gggcagagggatgaggctcc

SEQ ID NO: 1884 - DNA, 18 bp, Artificial Sequence
  Description of Artificial Sequence: Synthetic probe
tagcgcccgctcaaccag

SEQ ID NO: 1885 - DNA, 18 bp, Artificial Sequence
  Description of Artificial Sequence: Synthetic probe
tggccgagtcagcagagc

SEQ ID NO: 1886 - DNA, 19 bp, Artificial Sequence
  Description of Artificial Sequence: Synthetic probe
ctgtggcatccaggcgttg

SEQ ID NO: 1887 - DNA, 28 bp, Artificial Sequence
  Description of Artificial Sequence: Synthetic probe
ttggaataccctctactttcttgtgtaa

SEQ ID NO: 1888 - DNA, 25 bp, Artificial Sequence
  Description of Artificial Sequence: Synthetic probe
tgggtgagtgatctcacaggacaac

SEQ ID NO: 1889 - DNA, 28 bp, Artificial Sequence
  Description of Artificial Sequence: Synthetic probe
acttcccttaaaagtgttgtgttacttt

SEQ ID NO: 1890 - DNA, 31 bp, Artificial Sequence
  Description of Artificial Sequence: Synthetic probe
tgattcatttcaacttggtacatttgtgact

SEQ ID NO: 1891 - DNA, 31 bp, Artificial Sequence
  Description of Artificial Sequence: Synthetic probe
ttctacgatttatattctgtacttcctccag

SEQ ID NO: 1892 - DNA, 20 bp, Artificial Sequence
  Description of Artificial Sequence: Synthetic probe
ttctggtggtgctgtgtgca

SEQ ID NO: 1893 - DNA, 24 bp, Artificial Sequence
  Description of Artificial Sequence: Synthetic probe
atgagcctttacaaattgctgcca

SEQ ID NO: 1894 - DNA, 31 bp, Artificial Sequence
  Description of Artificial Sequence: Synthetic probe
gctggaaaaattctgacatatacaaaaggat

SEQ ID NO: 1895 - DNA, 32 bp, Artificial Sequence
  Description of Artificial Sequence: Synthetic probe
acaaatcaaaatgcccaagatttaagaccaaa

SEQ ID NO: 1896 - DNA, 27 bp, Artificial Sequence
  Description of Artificial Sequence: Synthetic probe
aaccaaagattgggctttcctatcagt

SEQ ID NO: 1897 - DNA, 29 bp, Artificial Sequence
  Description of Artificial Sequence: Synthetic probe
agcgattatacatcaggaagtaaacaaac

SEQ ID NO: 1898 - DNA, 31 bp, Artificial Sequence
  Description of Artificial Sequence: Synthetic probe
gacataggtcattagtaacaagtaagttgtt

SEQ ID NO: 1899 - DNA, 31 bp, Artificial Sequence
  Description of Artificial Sequence: Synthetic probe
ctttattagcagtgtgagaacagactcaaca

SEQ ID NO: 1900 - DNA, 27 bp, Artificial Sequence
  Description of Artificial Sequence: Synthetic probe
agagactttgtataaaggcagaacgtg

SEQ ID NO: 1901 - DNA, 32 bp, Artificial Sequence
  Description of Artificial Sequence: Synthetic probe
ccacacaacacatttatctacaaatgctttac

SEQ ID NO: 1902 - DNA, 28 bp, Artificial Sequence
  Description of Artificial Sequence: Synthetic probe
gatatctgaagtgtgtgaagagtttgga

SEQ ID NO: 1903 - DNA, 25 bp, Artificial Sequence
  Description of Artificial Sequence: Synthetic probe
gagtgggataaggaggcaatttccc

SEQ ID NO: 1904 - DNA, 25 bp, Artificial Sequence
  Description of Artificial Sequence: Synthetic probe
cacgctttgcacactcaatgagaat

SEQ ID NO: 1905 - DNA, 23 bp, Artificial Sequence
  Description of Artificial Sequence: Synthetic probe
acaggttggttgtggtcttttca

SEQ ID NO: 1906 - DNA, 22 bp, Artificial Sequence
  Description of Artificial Sequence: Synthetic probe
tctctcctccctgcttctgtct

SEQ ID NO: 1907 - DNA, 32 bp, Artificial Sequence
  Description of Artificial Sequence: Synthetic probe
gtaacttgaaccatcttttaactcaggtactg

SEQ ID NO: 1908 - DNA, 22 bp, Artificial Sequence
  Description of Artificial Sequence: Synthetic probe
gacaatggctcctggttgtagc

SEQ ID NO: 1909 - DNA, 29 bp, Artificial Sequence
  Description of Artificial Sequence: Synthetic probe
cttactgcctcttgcttctcttttcctat

SEQ ID NO: 1910 - DNA, 18 bp, Artificial Sequence
  Description of Artificial Sequence: Synthetic probe
aaggcgcactggcctcat

SEQ ID NO: 1911 - DNA, 27 bp, Artificial Sequence
  Description of Artificial Sequence: Synthetic probe
attcctcactgattgctcttaggtctg

SEQ ID NO: 1912 - DNA, 23 bp, Artificial Sequence
  Description of Artificial Sequence: Synthetic probe
cacttgtgccctgactttcaact

SEQ ID NO: 1913 - DNA, 23 bp, Artificial Sequence
  Description of Artificial Sequence: Synthetic probe
ctgaagacccaggtccagatgaa

SEQ ID NO: 1914 - DNA, 20 bp, Artificial Sequence
  Description of Artificial Sequence: Synthetic probe
cttgcagcagccagactgcc

SEQ ID NO: 1915 - DNA, 21 bp, Artificial Sequence
  Description of Artificial Sequence: Synthetic probe
gcgtcaggtgctaggacaact

SEQ ID NO: 1916 - DNA, 27 bp, Artificial Sequence
  Description of Artificial Sequence: Synthetic probe
catgcaagaagaatacagtgggcagag

SEQ ID NO: 1917 - DNA, 34 bp, Artificial Sequence
  Description of Artificial Sequence: Synthetic probe
tcgatccaaagtaatacatctgaaagaatatacg

SEQ ID NO: 1918 - DNA, 26 bp, Artificial Sequence
  Description of Artificial Sequence: Synthetic probe
gctcctgtgaaaatagatatgaggcc

SEQ ID NO: 1919 - DNA, 32 bp, Artificial Sequence
  Description of Artificial Sequence: Synthetic probe
attttcaagctcaacaatcctttagaatagct

SEQ ID NO: 1920 - DNA, 32 bp, Artificial Sequence
  Description of Artificial Sequence: Synthetic probe
catgaccaaagtattcttctgtatcttctttc

SEQ ID NO: 1921 - DNA, 18 bp, Artificial Sequence
  Description of Artificial Sequence: Synthetic probe
cgcgcccttgtgcctcat

SEQ ID NO: 1922 - DNA, 29 bp, Artificial Sequence
  Description of Artificial Sequence: Synthetic probe
ctgttttcaagtttggaaatgactaggga

SEQ ID NO: 1923 - DNA, 22 bp, Artificial Sequence
  Description of Artificial Sequence: Synthetic probe
gagaacagcccagaagttggac

SEQ ID NO: 1924 - DNA, 19 bp, Artificial Sequence
  Description of Artificial Sequence: Synthetic probe
agcagggcacgaccgctta

SEQ ID NO: 1925 - DNA, 20 bp, Artificial Sequence
  Description of Artificial Sequence: Synthetic probe
cctgagaggacagggaaccc

SEQ ID NO: 1926 - DNA, 20 bp, Artificial Sequence
  Description of Artificial Sequence: Synthetic probe
cccacttcccaaagatgccc

SEQ ID NO: 1927 - DNA, 28 bp, Artificial Sequence
  Description of Artificial Sequence: Synthetic probe
ctgataatgaatccgtgactacatcctc

SEQ ID NO: 1928 - DNA, 26 bp, Artificial Sequence
  Description of Artificial Sequence: Synthetic probe
aagtgctaaagtcagggccacttact

SEQ ID NO: 1929 - DNA, 22 bp, Artificial Sequence
  Description of Artificial Sequence: Synthetic probe
gggaggcagggttacagggaat

SEQ ID NO: 1930 - DNA, 20 bp, Artificial Sequence
  Description of Artificial Sequence: Synthetic probe
ttgccctctgggaaccaacc

SEQ ID NO: 1931 - DNA, 21 bp, Artificial Sequence
  Description of Artificial Sequence: Synthetic probe
gatggtgatggtgtggtggcg

SEQ ID NO: 1932 - DNA, 20 bp, Artificial Sequence
  Description of Artificial Sequence: Synthetic probe
gactcttccgggccggactc

SEQ ID NO: 1933 - DNA, 21 bp, Artificial Sequence
  Description of Artificial Sequence: Synthetic probe
gtgctatcgtccctgctgggt

SEQ ID NO: 1934 - DNA, 34 bp, Artificial Sequence
  Description of Artificial Sequence: Synthetic probe
ttaatttttcaagtggtctatcctgtacttacca

SEQ ID NO: 1935 - DNA, 32 bp, Artificial Sequence
  Description of Artificial Sequence: Synthetic probe
agatgaaacagtgtaagtttcaacagaaatct

SEQ ID NO: 1936 - DNA, 27 bp, Artificial Sequence
  Description of Artificial Sequence: Synthetic probe
tgatagttgaacttgtgcctgtctctt

SEQ ID NO: 1937 - DNA, 21 bp, Artificial Sequence
  Description of Artificial Sequence: Synthetic probe
gcccacattgttagggccgag

SEQ ID NO: 1938 - DNA, 33 bp, Artificial Sequence
  Description of Artificial Sequence: Synthetic probe
cccttttccagtatcattttcaaatagaatatg

SEQ ID NO: 1939 - DNA, 27 bp, Artificial Sequence
  Description of Artificial Sequence: Synthetic probe
cttaaagcctcccttcctcttactctc

SEQ ID NO: 1940 - DNA, 20 bp, Artificial Sequence
  Description of Artificial Sequence: Synthetic probe
actgtgagccacactgagcc

SEQ ID NO: 1941 - DNA, 20 bp, Artificial Sequence
  Description of Artificial Sequence: Synthetic probe
gggcttgccagatccatgca

SEQ ID NO: 1942 - DNA, 33 bp, Artificial Sequence
  Description of Artificial Sequence: Synthetic probe
cttttgaagaaacagttgtgtattattttgtgg

SEQ ID NO: 1943 - DNA, 21 bp, Artificial Sequence
  Description of Artificial Sequence: Synthetic probe
gctgtcttcggttctctctgc

SEQ ID NO: 1944 - DNA, 20 bp, Artificial Sequence
  Description of Artificial Sequence: Synthetic probe
ttgcgagagcaccgctgaca

SEQ ID NO: 1945 - DNA, 20 bp, Artificial Sequence
  Description of Artificial Sequence: Synthetic probe
tgggtccctgcctactcctg

SEQ ID NO: 1946 - DNA, 18 bp, Artificial Sequence
  Description of Artificial Sequence: Synthetic probe
gcacgaggagcagtgcct

SEQ ID NO: 1947 - DNA, 20 bp, Artificial Sequence
  Description of Artificial Sequence: Synthetic probe
tcgccgcgatcctggacttc

SEQ ID NO: 1948 - DNA, 98 bp, Artificial Sequence
  Description of Artificial Sequence: Synthetic primer
aatgatacggcgaccaccgagatctacactatagcctacactctttccctacacgacgctcttccgatctttttacagacagtgatgtgtgttctgaa

SEQ ID NO: 1949 - DNA, 95 bp, Artificial Sequence
  Description of Artificial Sequence: Synthetic primer
aatgatacggcgaccaccgagatctacactatagcctacactctttccctacacgacgctcttccgatcttcggcattcagattccaaacaagga

SEQ ID NO: 1950 - DNA, 97 bp, Artificial Sequence
  Description of Artificial Sequence: Synthetic primer
aatgatacggcgaccaccgagatctacactatagcctacactctttccctacacgacgctcttccgatcttcaacgagtttctgaaattgcattttg

SEQ ID NO: 1951 - DNA, 102 bp, Artificial Sequence
  Description of Artificial Sequence: Synthetic polynucleotide
aatgatacggcgaccaccgagatctacactatagcctacactctttccctacacgacgctcttccgatcttagttgccattccaagtgtcttatttttgttc

SEQ ID NO: 1952 - DNA, 99 bp, Artificial Sequence
  Description of Artificial Sequence: Synthetic primer
aatgatacggcgaccaccgagatctacactatagcctacactctttccctacacgacgctcttccgatctaaatcctttttctgtatgggattatggaa

SEQ ID NO: 1953 - DNA, 95 bp, Artificial Sequence
  Description of Artificial Sequence: Synthetic primer
aatgatacggcgaccaccgagatctacactatagcctacactctttccctacacgacgctcttccgatcttgctgttaccaaaggatgctgttct

SEQ ID NO: 1954 - DNA, 95 bp, Artificial Sequence
  Description of Artificial Sequence: Synthetic primer
aatgatacggcgaccaccgagatctacactatagcctacactctttccctacacgacgctcttccgatctcccagttgagcttgtttgtttcttc

SEQ ID NO: 1955 - DNA, 102 bp, Artificial Sequence
  Description of Artificial Sequence: Synthetic polynucleotide
aatgatacggcgaccaccgagatctacactatagcctacactctttccctacacgacgctcttccgatctctagcagtgtaaacagagtacatacataaaaa

SEQ ID NO: 1956 - DNA, 99 bp, Artificial Sequence
  Description of Artificial Sequence: Synthetic primer
aatgatacggcgaccaccgagatctacactatagcctacactctttccctacacgacgctcttccgatctgcgaaactctggctcaaaaaaaaaaaaaa

SEQ ID NO: 1957 - DNA, 101 bp, Artificial Sequence
  Description of Artificial Sequence: Synthetic polynucleotide
aatgatacggcgaccaccgagatctacactatagcctacactctttccctacacgacgctcttccgatctgtactatggaaatgatggtgattctctaatt

SEQ ID NO: 1958 - DNA, 102 bp, Artificial Sequence
  Description of Artificial Sequence: Synthetic polynucleotide
aatgatacggcgaccaccgagatctacactatagcctacactctttccctacacgacgctcttccgatctatttggtgtattacctttcgtggtataagttc

SEQ ID NO: 1959 - DNA, 97 bp, Artificial Sequence
  Description of Artificial Sequence: Synthetic primer
aatgatacggcgaccaccgagatctacactatagcctacactctttccctacacgacgctcttccgatctcctccaatagcttgcttttcacaattg

SEQ ID NO: 1960 - DNA, 97 bp, Artificial Sequence
  Description of Artificial Sequence: Synthetic primer
aatgatacggcgaccaccgagatctacactatagcctacactctttccctacacgacgctcttccgatctacatggcttttggtcttctaagtgaag

SEQ ID NO: 1961 - DNA, 99 bp, Artificial Sequence
  Description of Artificial Sequence: Synthetic primer
aatgatacggcgaccaccgagatctacactatagcctacactctttccctacacgacgctcttccgatctggcaaagcattaggtacttggtttatata

SEQ ID NO: 1962 - DNA, 91 bp, Artificial Sequence
  Description of Artificial Sequence: Synthetic primer
aatgatacggcgaccaccgagatctacactatagcctacactctttccctacacgacgctcttccgatctactggatcgctgtcttctggg

SEQ ID NO: 1963 - DNA, 97 bp, Artificial Sequence
  Description of Artificial Sequence: Synthetic primer
aatgatacggcgaccaccgagatctacactatagcctacactctttccctacacgacgctcttccgatctccaggatatgccacctttaactcagtt

SEQ ID NO: 1964 - DNA, 104 bp, Artificial Sequence
  Description of Artificial Sequence: Synthetic polynucleotide
aatgatacggcgaccaccgagatctacactatagcctacactctttccctacacgacgctcttccgatcttaatagctgaagaggaagcatataagtcagaatt

SEQ ID NO: 1965 - DNA, 100 bp, Artificial Sequence
  Description of Artificial Sequence: Synthetic polynucleotide
aatgatacggcgaccaccgagatctacactatagcctacactctttccctacacgacgctcttccgatctagatcaaagtacactgtaaaaagcaatact

SEQ ID NO: 1966 - DNA, 98 bp, Artificial Sequence
  Description of Artificial Sequence: Synthetic primer
aatgatacggcgaccaccgagatctacactatagcctacactctttccctacacgacgctcttccgatctatttctttgttgcttggttctttgtttg

SEQ ID NO: 1967 - DNA, 93 bp, Artificial Sequence
  Description of Artificial Sequence: Synthetic primer
aatgatacggcgaccaccgagatctacactatagcctacactctttccctacacgacgctcttccgatctcatgctcctgcaagaagccatct

SEQ ID NO: 1968 - DNA, 98 bp, Artificial Sequence
  Description of Artificial Sequence: Synthetic primer
aatgatacggcgaccaccgagatctacactatagcctacactctttccctacacgacgctcttccgatcttatatggctgttgtgcccttctcttagt

SEQ ID NO: 1969 - DNA, 102 bp, Artificial Sequence
  Description of Artificial Sequence: Synthetic polynucleotide
aatgatacggcgaccaccgagatctacactatagcctacactctttccctacacgacgctcttccgatctgatttgtggataaacctgatttttttccctcc

SEQ ID NO: 1970 - DNA, 99 bp, Artificial Sequence
  Description of Artificial Sequence: Synthetic primer
aatgatacggcgaccaccgagatctacactatagcctacactctttccctacacgacgctcttccgatcttgtatcgtcgtgaccaagatgtttgtaaa

SEQ ID NO: 1971 - DNA, 101 bp, Artificial Sequence
  Description of Artificial Sequence: Synthetic polynucleotide
aatgatacggcgaccaccgagatctacactatagcctacactctttccctacacgacgctcttccgatcttgagttttctgagtgcttttatcagaatgat

SEQ ID NO: 1972 - DNA, 99 bp, Artificial Sequence
  Description of Artificial Sequence: Synthetic primer
aatgatacggcgaccaccgagatctacactatagcctacactctttccctacacgacgctcttccgatctggccattcttaatgtaatgggaaaagact

SEQ ID NO: 1973 - DNA, 100 bp, Artificial Sequence
  Description of Artificial Sequence: Synthetic polynucleotide
aatgatacggcgaccaccgagatctacactatagcctacactctttccctacacgacgctcttccgatctcactttttgtttgtttgtttgcttgcttgt

SEQ ID NO: 1974 - DNA, 96 bp, Artificial Sequence
  Description of Artificial Sequence: Synthetic primer
aatgatacggcgaccaccgagatctacactatagcctacactctttccctacacgacgctcttccgatctcaaaaaatctggagttcagttgggat

SEQ ID NO: 1975 - DNA, 99 bp, Artificial Sequence
  Description of Artificial Sequence: Synthetic primer
aatgatacggcgaccaccgagatctacactatagcctacactctttccctacacgacgctcttccgatctcttaacacattgactttttggttcgtgca

SEQ ID NO: 1976 - DNA, 102 bp, Artificial Sequence
  Description of Artificial Sequence: Synthetic polynucleotide
aatgatacggcgaccaccgagatctacactatagcctacactctttccctacacgacgctcttccgatctctggataaagtatgatactttaatgctgatgg

SEQ ID NO: 1977 - DNA, 93 bp, Artificial Sequence
  Description of Artificial Sequence: Synthetic primer
aatgatacggcgaccaccgagatctacactatagcctacactctttccctacacgacgctcttccgatctgacagtgggatggcacagcaaag

SEQ ID NO: 1978 - DNA, 98 bp, Artificial Sequence
  Description of Artificial Sequence: Synthetic primer
aatgatacggcgaccaccgagatctacactatagcctacactctttccctacacgacgctcttccgatctttttgagctgtcttgacgttcacagata

SEQ ID NO: 1979 - DNA, 101 bp, Artificial Sequence
  Description of Artificial Sequence: Synthetic polynucleotide
aatgatacggcgaccaccgagatctacactatagcctacactctttccctacacgacgctcttccgatctaaaacgatgactgtattttttcccttaactc

SEQ ID NO: 1980 - DNA, 99 bp, Artificial Sequence
  Description of Artificial Sequence: Synthetic primer
aatgatacggcgaccaccgagatctacactatagcctacactctttccctacacgacgctcttccgatctgagaacagaatcttgtgacactttagtga

SEQ ID NO: 1981 - DNA, 103 bp, Artificial Sequence
  Description of Artificial Sequence: Synthetic polynucleotide
aatgatacggcgaccaccgagatctacactatagcctacactctttccctacacgacgctcttccgatctagaacagaatcttgtgacactttagtgatatat

SEQ ID NO: 1982 - DNA, 92 bp, Artificial Sequence
  Description of Artificial Sequence: Synthetic primer
aatgatacggcgaccaccgagatctacactatagcctacactctttccctacacgacgctcttccgatcttaggaggagcttgggcctttgt

SEQ ID NO: 1983 - DNA, 103 bp, Artificial Sequence
  Description of Artificial Sequence: Synthetic polynucleotide
aatgatacggcgaccaccgagatctacactatagcctacactctttccctacacgacgctcttccgatctactggttgttgttgtttttttttctccctatat

SEQ ID NO: 1984 - DNA, 96 bp, Artificial Sequence
  Description of Artificial Sequence: Synthetic primer
aatgatacggcgaccaccgagatctacactatagcctacactctttccctacacgacgctcttccgatctaactaaaagctgggtatcttagacgt

SEQ ID NO: 1985 - DNA, 100 bp, Artificial Sequence
  Description of Artificial Sequence: Synthetic polynucleotide
aatgatacggcgaccaccgagatctacactatagcctacactctttccctacacgacgctcttccgatcttgaccatgttgtttttaaggatttgcgtat

SEQ ID NO: 1986 - DNA, 97 bp, Artificial Sequence
  Description of Artificial Sequence: Synthetic primer
aatgatacggcgaccaccgagatctacactatagcctacactctttccctacacgacgctcttccgatctacaggcttaaccaatacgtgttaaaag

SEQ ID NO: 1987 - DNA, 99 bp, Artificial Sequence
  Description of Artificial Sequence: Synthetic primer
aatgatacggcgaccaccgagatctacactatagcctacactctttccctacacgacgctcttccgatcttaaacaaaagtgttgtcttcatgctagtt

SEQ ID NO: 1988 - DNA, 105 bp, Artificial Sequence
  Description of Artificial Sequence: Synthetic polynucleotide
aatgatacggcgaccaccgagatctacactatagcctacactctttccctacacgacgctcttccgatctgtatgatctcttacctatgactctactgaaataga

SEQ ID NO: 1989 - DNA, 102 bp, Artificial Sequence
  Description of Artificial Sequence: Synthetic polynucleotide
aatgatacggcgaccaccgagatctacactatagcctacactctttccctacacgacgctcttccgatcttaactggtgtacttgataggcatttgaattgt

SEQ ID NO: 1990 - DNA, 102 bp, Artificial Sequence
  Description of Artificial Sequence: Synthetic polynucleotide
aatgatacggcgaccaccgagatctacactatagcctacactctttccctacacgacgctcttccgatctccacttctcttatttacattttctaatccctt

SEQ ID NO: 1991 - DNA, 98 bp, Artificial Sequence
  Description of Artificial Sequence: Synthetic primer
aatgatacggcgaccaccgagatctacactatagcctacactctttccctacacgacgctcttccgatctactcaaactattgggtggatttgtttgt

SEQ ID NO: 1992 - DNA, 91 bp, Artificial Sequence
  Description of Artificial Sequence: Synthetic primer
aatgatacggcgaccaccgagatctacactatagcctacactctttccctacacgacgctcttccgatctaagaatgcctgggactgaggg

SEQ ID NO: 1993 - DNA, 105 bp, Artificial Sequence
  Description of Artificial Sequence: Synthetic polynucleotide
aatgatacggcgaccaccgagatctacactatagcctacactctttccctacacgacgctcttccgatctgtcactaccattgtattctatatcaacatgctttt

SEQ ID NO: 1994 - DNA, 105 bp, Artificial Sequence
  Description of Artificial Sequence: Synthetic polynucleotide
aatgatacggcgaccaccgagatctacactatagcctacactctttccctacacgacgctcttccgatctcttccaaatagtatgttctcattaaaagaggtgtt

SEQ ID NO: 1995 - DNA, 98 bp, Artificial Sequence
  Description of Artificial Sequence: Synthetic primer
aatgatacggcgaccaccgagatctacactatagcctacactctttccctacacgacgctcttccgatctccttcttcaatttttgttgtttccatgt

SEQ ID NO: 1996 - DNA, 103 bp, Artificial Sequence
  Description of Artificial Sequence: Synthetic polynucleotide
aatgatacggcgaccaccgagatctacactatagcctacactctttccctacacgacgctcttccgatctccaaagctattttcacaatcttttcttatagac

SEQ ID NO: 1997 - DNA, 101 bp, Artificial Sequence
  Description of Artificial Sequence: Synthetic polynucleotide
aatgatacggcgaccaccgagatctacactatagcctacactctttccctacacgacgctcttccgatctatctttgctgtttttttctctggttttctgt

SEQ ID NO: 1998 - DNA, 98 bp, Artificial Sequence
  Description of Artificial Sequence: Synthetic primer
aatgatacggcgaccaccgagatctacactatagcctacactctttccctacacgacgctcttccgatctgtcctttggtgaagctatttatacatgt

SEQ ID NO: 1999 - DNA, 101 bp, Artificial Sequence
  Description of Artificial Sequence: Synthetic polynucleotide
aatgatacggcgaccaccgagatctacactatagcctacactctttccctacacgacgctcttccgatctctgaaaacctcttctttattttcagagtgtc

SEQ ID NO: 2000 - DNA, 95 bp, Artificial Sequence
  Description of Artificial Sequence: Synthetic primer
aatgatacggcgaccaccgagatctacactatagcctacactctttccctacacgacgctcttccgatctttacatgaactctatgtcgtggcat

SEQ ID NO: 2001 - DNA, 105 bp, Artificial Sequence
  Description of Artificial Sequence: Synthetic polynucleotide
aatgatacggcgaccaccgagatctacactatagcctacactctttccctacacgacgctcttccgatcttggtagtagtatcagtagtaaaagtatttattccc

SEQ ID NO: 2002 - DNA, 97 bp, Artificial Sequence
  Description of Artificial Sequence: Synthetic primer
aatgatacggcgaccaccgagatctacactatagcctacactctttccctacacgacgctcttccgatctcagttgggtacagtcatggtaatgcat

SEQ ID NO: 2003 - DNA, 92 bp, Artificial Sequence
  Description of Artificial Sequence: Synthetic primer
aatgatacggcgaccaccgagatctacactatagcctacactctttccctacacgacgctcttccgatctggccgtgggttggacaagtttg

SEQ ID NO: 2004 - DNA, 99 bp, Artificial Sequence
  Description of Artificial Sequence: Synthetic primer
aatgatacggcgaccaccgagatctacactatagcctacactctttccctacacgacgctcttccgatctatttctctcattagcccggttttcagata

SEQ ID NO: 2005 - DNA, 104 bp, Artificial Sequence
  Description of Artificial Sequence: Synthetic polynucleotide
aatgatacggcgaccaccgagatctacactatagcctacactctttccctacacgacgctcttccgatctctgttaaagttcatggcttttgtgttttacctta

SEQ ID NO: 2006 - DNA, 99 bp, Artificial Sequence
  Description of Artificial Sequence: Synthetic primer
aatgatacggcgaccaccgagatctacactatagcctacactctttccctacacgacgctcttccgatctgagcactgtcttaaaataacttacttgct

SEQ ID NO: 2007 - DNA, 89 bp, Artificial Sequence
  Description of Artificial Sequence: Synthetic primer
aatgatacggcgaccaccgagatctacactatagcctacactctttccctacacgacgctcttccgatctacacgctctacccactgca

SEQ ID NO: 2008 - DNA, 98 bp, Artificial Sequence
  Description of Artificial Sequence: Synthetic primer
aatgatacggcgaccaccgagatctacactatagcctacactctttccctacacgacgctcttccgatctgaagaagcagaataactaaaaatgtgcc

SEQ ID NO: 2009 - DNA, 101 bp, Artificial Sequence
  Description of Artificial Sequence: Synthetic polynucleotide
aatgatacggcgaccaccgagatctacactatagcctacactctttccctacacgacgctcttccgatcttgttgggtagttccttatgtaatgttttttg

SEQ ID NO: 2010 - DNA, 101 bp, Artificial Sequence
  Description of Artificial Sequence: Synthetic polynucleotide
aatgatacggcgaccaccgagatctacactatagcctacactctttccctacacgacgctcttccgatctcctcagtttgtcactaaaatctcttcatttt

SEQ ID NO: 2011 - DNA, 103 bp, Artificial Sequence
  Description of Artificial Sequence: Synthetic polynucleotide
aatgatacggcgaccaccgagatctacactatagcctacactctttccctacacgacgctcttccgatcttaagtgcaaatagtgtatctgacctattatcaa

SEQ ID NO: 2012 - DNA, 100 bp, Artificial Sequence
  Description of Artificial Sequence: Synthetic polynucleotide
aatgatacggcgaccaccgagatctacactatagcctacactctttccctacacgacgctcttccgatctctttgctattctcagatgactctgtgtttt

SEQ ID NO: 2013 - DNA, 102 bp, Artificial Sequence
  Description of Artificial Sequence: Synthetic polynucleotide
aatgatacggcgaccaccgagatctacactatagcctacactctttccctacacgacgctcttccgatctgatcatcaaatgctctttaatggccttttaaa

SEQ ID NO: 2014 - DNA, 97 bp, Artificial Sequence
  Description of Artificial Sequence: Synthetic primer
aatgatacggcgaccaccgagatctacactatagcctacactctttccctacacgacgctcttccgatctaatgtatcctgttcatctttattgccc

SEQ ID NO: 2015 - DNA, 104 bp, Artificial Sequence
  Description of Artificial Sequence: Synthetic polynucleotide
aatgatacggcgaccaccgagatctacactatagcctacactctttccctacacgacgctcttccgatctattagaaagagatggaatcagtgatttcagattg

SEQ ID NO: 2016 - DNA, 102 bp, Artificial Sequence
  Description of Artificial Sequence: Synthetic polynucleotide
aatgatacggcgaccaccgagatctacactatagcctacactctttccctacacgacgctcttccgatcttaaattagctgtcaaacctcctaacttcactg

SEQ ID NO: 2017 - DNA, 95 bp, Artificial Sequence
  Description of Artificial Sequence: Synthetic primer
aatgatacggcgaccaccgagatctacactatagcctacactctttccctacacgacgctcttccgatctaacattggtgtgtaacaaaatccgt

SEQ ID NO: 2018 - DNA, 102 bp, Artificial Sequence
  Description of Artificial Sequence: Synthetic polynucleotide
aatgatacggcgaccaccgagatctacactatagcctacactctttccctacacgacgctcttccgatctatactggttctactgtttctaagtatgtgatt

SEQ ID NO: 2019 - DNA, 96 bp, Artificial Sequence
  Description of Artificial Sequence: Synthetic primer
aatgatacggcgaccaccgagatctacactatagcctacactctttccctacacgacgctcttccgatctgctgaacgtgtcttaatgagactaca

SEQ ID NO: 2020 - DNA, 96 bp, Artificial Sequence
  Description of Artificial Sequence: Synthetic primer
aatgatacggcgaccaccgagatctacactatagcctacactctttccctacacgacgctcttccgatctgatcttgaaccctcttctggaaaggg

SEQ ID NO: 2021 - DNA, 88 bp, Artificial Sequence
  Description of Artificial Sequence: Synthetic primer
aatgatacggcgaccaccgagatctacactatagcctacactctttccctacacgacgctcttccgatctttaacaggcgcgtcccgg

SEQ ID NO: 2022 - DNA, 103 bp, Artificial Sequence
  Description of Artificial Sequence: Synthetic polynucleotide
aatgatacggcgaccaccgagatctacactatagcctacactctttccctacacgacgctcttccgatcttcccaattttctcttcctttttcttttttctgt

SEQ ID NO: 2023 - DNA, 94 bp, Artificial Sequence
  Description of Artificial Sequence: Synthetic primer
aatgatacggcgaccaccgagatctacactatagcctacactctttccctacacgacgctcttccgatctgaaaaagaacgaagctggtttcca

SEQ ID NO: 2024 - DNA, 90 bp, Artificial Sequence
  Description of Artificial Sequence: Synthetic primer
aatgatacggcgaccaccgagatctacactatagcctacactctttccctacacgacgctcttccgatctatggcagcttcttggtgcgt

SEQ ID NO: 2025 - DNA, 93 bp, Artificial Sequence
  Description of Artificial Sequence: Synthetic primer
aatgatacggcgaccaccgagatctacactatagcctacactctttccctacacgacgctcttccgatcttctttgagcttgcctgtctctgt

SEQ ID NO: 2026 - DNA, 91 bp, Artificial Sequence
  Description of Artificial Sequence: Synthetic primer
aatgatacggcgaccaccgagatctacactatagcctacactctttccctacacgacgctcttccgatctggaggtgtacgagggcgtgtg

SEQ ID NO: 2027 - DNA, 99 bp, Artificial Sequence
  Description of Artificial Sequence: Synthetic primer
aatgatacggcgaccaccgagatctacactatagcctacactctttccctacacgacgctcttccgatctaatttcaccttcgtttttttccttctgca

SEQ ID NO: 2028 - DNA, 94 bp, Artificial Sequence
  Description of Artificial Sequence: Synthetic primer
aatgatacggcgaccaccgagatctacactatagcctacactctttccctacacgacgctcttccgatcttgaagtcctcgttgtcttgttggc

SEQ ID NO: 2029 - DNA, 96 bp, Artificial Sequence
  Description of Artificial Sequence: Synthetic primer
aatgatacggcgaccaccgagatctacactatagcctacactctttccctacacgacgctcttccgatctagctctcatgggtgaacattttcctt

SEQ ID NO: 2030 - DNA, 94 bp, Artificial Sequence
  Description of Artificial Sequence: Synthetic primer
aatgatacggcgaccaccgagatctacactatagcctacactctttccctacacgacgctcttccgatcttgaacagcctttctctttcggttt

SEQ ID NO: 2031 - DNA, 96 bp, Artificial Sequence
  Description of Artificial Sequence: Synthetic primer
aatgatacggcgaccaccgagatctacactatagcctacactctttccctacacgacgctcttccgatcttcatggatgatctgacttgggtttca

SEQ ID NO: 2032 - DNA, 93 bp, Artificial Sequence
  Description of Artificial Sequence: Synthetic primer
aatgatacggcgaccaccgagatctacactatagcctacactctttccctacacgacgctcttccgatctcacaccaagccaacaccagtact

SEQ ID NO: 2033 - DNA, 94 bp, Artificial Sequence
  Description of Artificial Sequence: Synthetic primer
aatgatacggcgaccaccgagatctacactatagcctacactctttccctacacgacgctcttccgatctttgtctggagttgtcagctcttcc

SEQ ID NO: 2034 - DNA, 88 bp, Artificial Sequence
  Description of Artificial Sequence: Synthetic primer
aatgatacggcgaccaccgagatctacactatagcctacactctttccctacacgacgctcttccgatcttgctccgcctcctgcgtt

SEQ ID NO: 2035 - DNA, 91 bp, Artificial Sequence
  Description of Artificial Sequence: Synthetic primer
aatgatacggcgaccaccgagatctacactatagcctacactctttccctacacgacgctcttccgatctactcctctgagtcgccaggga

SEQ ID NO: 2036 - DNA, 93 bp, Artificial Sequence
  Description of Artificial Sequence: Synthetic primer
aatgatacggcgaccaccgagatctacactatagcctacactctttccctacacgacgctcttccgatctgccatctctaggaactccgagca

SEQ ID NO: 2037 - DNA, 91 bp, Artificial Sequence
  Description of Artificial Sequence: Synthetic primer
aatgatacggcgaccaccgagatctacactatagcctacactctttccctacacgacgctcttccgatctgctatcgtccagcgcagtcca

SEQ ID NO: 2038 - DNA, 93 bp, Artificial Sequence
  Description of Artificial Sequence: Synthetic primer
aatgatacggcgaccaccgagatctacactatagcctacactctttccctacacgacgctcttccgatctgagtgtggagagaaaagggagtg

SEQ ID NO: 2039 - DNA, 89 bp, Artificial Sequence
  Description of Artificial Sequence: Synthetic primer
aatgatacggcgaccaccgagatctacactatagcctacactctttccctacacgacgctcttccgatctcgtgcgcgtgaatatgcgg

SEQ ID NO: 2040 - DNA, 90 bp, Artificial Sequence
  Description of Artificial Sequence: Synthetic primer
aatgatacggcgaccaccgagatctacactatagcctacactctttccctacacgacgctcttccgatctcctgtagctgggatgggcgg

SEQ ID NO: 2041 - DNA, 91 bp, Artificial Sequence
  Description of Artificial Sequence: Synthetic primer
aatgatacggcgaccaccgagatctacactatagcctacactctttccctacacgacgctcttccgatctcattgcgtgtgctcaggacgt

SEQ ID NO: 2042 - DNA, 90 bp, Artificial Sequence; identical to SEQ ID NO: 2040
  Description of Artificial Sequence: Synthetic primer

SEQ ID NO: 2043 - DNA, 96 bp, Artificial Sequence
  Description of Artificial Sequence: Synthetic primer
aatgatacggcgaccaccgagatctacactatagcctacactctttccctacacgacgctcttccgatctctgtgatcttaatgtgcccgtccttg

SEQ ID NO: 2044 - DNA, 88 bp, Artificial Sequence
  Description of Artificial Sequence: Synthetic primer
aatgatacggcgaccaccgagatctacactatagcctacactctttccctacacgacgctcttccgatctgcgtatgcacgcaggtgg

SEQ ID NO: 2045 - DNA, 90 bp, Artificial Sequence
  Description of Artificial Sequence: Synthetic primer
aatgatacggcgaccaccgagatctacactatagcctacactctttccctacacgacgctcttccgatctaggtagtccagggctgacac

SEQ ID NO: 2046 - DNA, 88 bp, Artificial Sequence
  Description of Artificial Sequence: Synthetic primer
aatgatacggcgaccaccgagatctacactatagcctacactctttccctacacgacgctcttccgatctacaggccgcgaagtccat

SEQ ID NO: 2047 - DNA, 89 bp, Artificial Sequence
  Description of Artificial Sequence: Synthetic primer
aatgatacggcgaccaccgagatctacactatagcctacactctttccctacacgacgctcttccgatctaggagtcgctacctggccc

SEQ ID NO: 2048 - DNA, 89 bp, Artificial Sequence
  Description of Artificial Sequence: Synthetic primer
aatgatacggcgaccaccgagatctacactatagcctacactctttccctacacgacgctcttccgatctcggcctgtggccttctcct

SEQ ID NO: 2049 - DNA, 90 bp, Artificial Sequence
  Description of Artificial Sequence: Synthetic primer
aatgatacggcgaccaccgagatctacactatagcctacactctttccctacacgacgctcttccgatctcccaggcacaggcagaagtg

SEQ ID NO: 2050 - DNA, 89 bp, Artificial Sequence
  Description of Artificial Sequence: Synthetic primer
aatgatacggcgaccaccgagatctacactatagcctacactctttccctacacgacgctcttccgatctcccgtgtccctcctaagcg

SEQ ID NO: 2051 - DNA, 92 bp, Artificial Sequence
  Description of Artificial Sequence: Synthetic primer
aatgatacggcgaccaccgagatctacactatagcctacactctttccctacacgacgctcttccgatcttctgaatcccgagaggccaagg

SEQ ID NO: 2052 - DNA, 89 bp, Artificial Sequence
  Description of Artificial Sequence: Synthetic primer
aatgatacggcgaccaccgagatctacactatagcctacactctttccctacacgacgctcttccgatctgccctggcagcgggtacta

SEQ ID NO: 2053 - DNA, 96 bp, Artificial Sequence
  Description of Artificial Sequence: Synthetic primer
aatgatacggcgaccaccgagatctacactatagcctacactctttccctacacgacgctcttccgatctgatcccaaggaagagaagtgagtgtg

SEQ ID NO: 2054 - DNA, 91 bp, Artificial Sequence
  Description of Artificial Sequence: Synthetic primer
aatgatacggcgaccaccgagatctacactatagcctacactctttccctacacgacgctcttccgatctcggccctctagggactcgaac

SEQ ID NO: 2055 - DNA, 99 bp, Artificial Sequence
  Description of Artificial Sequence: Synthetic primer
aatgatacggcgaccaccgagatctacactatagcctacactctttccctacacgacgctcttccgatcttcatatagagtaaatgttgaccaaaggga

SEQ ID NO: 2056 - DNA, 103 bp, Artificial Sequence
  Description of Artificial Sequence: Synthetic polynucleotide
aatgatacggcgaccaccgagatctacactatagcctacactctttccctacacgacgctcttccgatctttttgaaaagaaaaactgcttagtaactagcag

SEQ ID NO: 2057 - DNA, 93 bp, Artificial Sequence
  Description of Artificial Sequence: Synthetic primer
aatgatacggcgaccaccgagatctacactatagcctacactctttccctacacgacgctcttccgatctcctggaggatgatggctgactta

SEQ ID NO: 2058 - DNA, 90 bp, Artificial Sequence
  Description of Artificial Sequence: Synthetic primer
aatgatacggcgaccaccgagatctacactatagcctacactctttccctacacgacgctcttccgatctgaggtggaagagacaggccc

SEQ ID NO: 2059 - DNA, 94 bp, Artificial Sequence
  Description of Artificial Sequence: Synthetic primer
aatgatacggcgaccaccgagatctacactatagcctacactctttccctacacgacgctcttccgatctacaggaagagcacagtcactttga

SEQ ID NO: 2060 - DNA, 91 bp, Artificial Sequence
  Description of Artificial Sequence: Synthetic primer
aatgatacggcgaccaccgagatctacactatagcctacactctttccctacacgacgctcttccgatcttgtccttggcacaacaactgc

SEQ ID NO: 2061 - DNA, 91 bp, Artificial Sequence
  Description of Artificial Sequence: Synthetic primer
aatgatacggcgaccaccgagatctacactatagcctacactctttccctacacgacgctcttccgatcttgagggtgtctctctgtggct

SEQ ID NO: 2062 - DNA, 88 bp, Artificial Sequence
  Description of Artificial Sequence: Synthetic primer
aatgatacggcgaccaccgagatctacactatagcctacactctttccctacacgacgctcttccgatctggcttgggtcgttgggca

SEQ ID NO: 2063 - DNA, 93 bp, Artificial Sequence
  Description of Artificial Sequence: Synthetic primer
aatgatacggcgaccaccgagatctacactatagcctacactctttccctacacgacgctcttccgatctgcggtgctgtgataacattcagc

SEQ ID NO: 2064 - DNA, 88 bp, Artificial Sequence
  Description of Artificial Sequence: Synthetic primer
aatgatacggcgaccaccgagatctacactatagcctacactctttccctacacgacgctcttccgatctagtcctgccttcctgccc

SEQ ID NO: 2065 - DNA, 91 bp, Artificial Sequence
  Description of Artificial Sequence: Synthetic primer
aatgatacggcgaccaccgagatctacactatagcctacactctttccctacacgacgctcttccgatctcaaatctcaggctatgggccc

SEQ ID NO: 2066 - DNA, 91 bp, Artificial Sequence
  Description of Artificial Sequence: Synthetic primer
aatgatacggcgaccaccgagatctacactatagcctacactctttccctacacgacgctcttccgatcttgttctgctgcctggcagaga

SEQ ID NO: 2067 - DNA, 97 bp, Artificial Sequence
  Description of Artificial Sequence: Synthetic primer
aatgatacggcgaccaccgagatctacactatagcctacactctttccctacacgacgctcttccgatcttgacaccttgaacacgaatcatcttta

SEQ ID NO: 2068 - DNA, 88 bp, Artificial Sequence
  Description of Artificial Sequence: Synthetic primer
aatgatacggcgaccaccgagatctacactatagcctacactctttccctacacgacgctcttccgatctagagggcacgcttgcagc

SEQ ID NO: 2069 - DNA, 92 bp, Artificial Sequence
  Description of Artificial Sequence: Synthetic primer
aatgatacggcgaccaccgagatctacactatagcctacactctttccctacacgacgctcttccgatctgtggaaatctggcagcacacac

SEQ ID NO: 2070 - DNA, 90 bp, Artificial Sequence
  Description of Artificial Sequence: Synthetic primer
aatgatacggcgaccaccgagatctacactatagcctacactctttccctacacgacgctcttccgatctgggcctgacagagtgcagac

SEQ ID NO: 2071 - DNA, 91 bp, Artificial Sequence
  Description of Artificial Sequence: Synthetic primer
aatgatacggcgaccaccgagatctacactatagcctacactctttccctacacgacgctcttccgatctactccaggcttcttcggaagg

SEQ ID NO: 2072 - DNA, 100 bp, Artificial Sequence
  Description of Artificial Sequence: Synthetic polynucleotide
aatgatacggcgaccaccgagatctacactatagcctacactctttccctacacgacgctcttccgatctcaacaagaagttactgtgctcacatttgtg

SEQ ID NO: 2073 - DNA, 93 bp, Artificial Sequence
  Description of Artificial Sequence: Synthetic primer
aatgatacggcgaccaccgagatctacactatagcctacactctttccctacacgacgctcttccgatctggagagacagtcaggcttaggct

SEQ ID NO: 2074 - DNA, 100 bp, Artificial Sequence
  Description of Artificial Sequence: Synthetic polynucleotide
aatgatacggcgaccaccgagatctacactatagcctacactctttccctacacgacgctcttccgatctttttcattttagctgatagaggagaagggt

SEQ ID NO: 2075 - DNA, 99 bp, Artificial Sequence
  Description of Artificial Sequence: Synthetic primer
aatgatacggcgaccaccgagatctacactatagcctacactctttccctacacgacgctcttccgatctaattagagaactagagaaacaaggagact

SEQ ID NO: 2076 - DNA, 91 bp, Artificial Sequence
  Description of Artificial Sequence: Synthetic primer
aatgatacggcgaccaccgagatctacactatagcctacactctttccctacacgacgctcttccgatctgggcaccagagagaaggcagg

SEQ ID NO: 2077 - DNA, 90 bp, Artificial Sequence
  Description of Artificial Sequence: Synthetic primer
aatgatacggcgaccaccgagatctacactatagcctacactctttccctacacgacgctcttccgatctttatgagcatgggctgggct

SEQ ID NO: 2078 - DNA, 90 bp, Artificial Sequence
  Description of Artificial Sequence: Synthetic primer
aatgatacggcgaccaccgagatctacactatagcctacactctttccctacacgacgctcttccgatctaccaaggagcgtgggaaagc

SEQ ID NO: 2079 - DNA, 100 bp, Artificial Sequence
  Description of Artificial Sequence: Synthetic polynucleotide
aatgatacggcgaccaccgagatctacactatagcctacactctttccctacacgacgctcttccgatcttaaaatcaattttggacatggagaagtact

SEQ ID NO: 2080 - DNA, 90 bp, Artificial Sequence
  Description of Artificial Sequence: Synthetic primer
aatgatacggcgaccaccgagatctacactatagcctacactctttccctacacgacgctcttccgatctcaccagcagcctctccctta

SEQ ID NO: 2081 - DNA, 102 bp, Artificial Sequence
  Description of Artificial Sequence: Synthetic polynucleotide
aatgatacggcgaccaccgagatctacactatagcctacactctttccctacacgacgctcttccgatctatgagatagtgacagtgtatctcaagtaaata

SEQ ID NO: 2082 - DNA, 96 bp, Artificial Sequence
  Description of Artificial Sequence: Synthetic primer
aatgatacggcgaccaccgagatctacactatagcctacactctttccctacacgacgctcttccgatctgactaaaaacactaaatcccggcaca

SEQ ID NO: 2083 - DNA, 93 bp, Artificial Sequence
  Description of Artificial Sequence: Synthetic primer
aatgatacggcgaccaccgagatctacactatagcctacactctttccctacacgacgctcttccgatctgaggaggatggtggcagcagtag

SEQ ID NO: 2084 - DNA, 94 bp, Artificial Sequence
  Description of Artificial Sequence: Synthetic primer
aatgatacggcgaccaccgagatctacactatagcctacactctttccctacacgacgctcttccgatctaccttataggtccaagggtagcca

SEQ ID NO: 2085 - DNA, 103 bp, Artificial Sequence
  Description of Artificial Sequence: Synthetic polynucleotide
aatgatacggcgaccaccgagatctacactatagcctacactctttccctacacgacgctcttccgatctcttaaatgtcaagaaatacagaatcatgtcttg

SEQ ID NO: 2086 - DNA, 103 bp, Artificial Sequence
  Description of Artificial Sequence: Synthetic polynucleotide
aatgatacggcgaccaccgagatctacactatagcctacactctttccctacacgacgctcttccgatctcagtcatgtatatttgtggttaaaatgtaaacc

SEQ ID NO: 2087 - DNA, 97 bp, Artificial Sequence
  Description of Artificial Sequence: Synthetic primer
aatgatacggcgaccaccgagatctacactatagcctacactctttccctacacgacgctcttccgatctcctgttcctatgggttcatttccaaga

SEQ ID NO: 2088 - DNA, 99 bp, Artificial Sequence
  Description of Artificial Sequence: Synthetic primer
aatgatacggcgaccaccgagatctacactatagcctacactctttccctacacgacgctcttccgatctcaactgatgtaagtattgctcttctgcag

SEQ ID NO: 2089 - DNA, 100 bp, Artificial Sequence
  Description of Artificial Sequence: Synthetic polynucleotide
aatgatacggcgaccaccgagatctacactatagcctacactctttccctacacgacgctcttccgatcttggttcttatatgcttttttgcttttactg

SEQ ID NO: 2090 - DNA, 102 bp, Artificial Sequence
  Description of Artificial Sequence: Synthetic polynucleotide
aatgatacggcgaccaccgagatctacactatagcctacactctttccctacacgacgctcttccgatctgcttttaagtggtagccatagtatgattattt

SEQ ID NO: 2091 - DNA, 98 bp, Artificial Sequence
  Description of Artificial Sequence: Synthetic primer
aatgatacggcgaccaccgagatctacactatagcctacactctttccctacacgacgctcttccgatctcctacaccatttttgcatgtactgatgt

SEQ ID NO: 2092 - DNA, 99 bp, Artificial Sequence
  Description of Artificial Sequence: Synthetic primer
aatgatacggcgaccaccgagatctacactatagcctacactctttccctacacgacgctcttccgatcttttggagtaccttaacatgatgttatctg

SEQ ID NO: 2093 - DNA, 103 bp, Artificial Sequence
  Description of Artificial Sequence: Synthetic polynucleotide
aatgatacggcgaccaccgagatctacactatagcctacactctttccctacacgacgctcttccgatctaaagtcgtaattttgtttctaaactcatttggc

SEQ ID NO: 2094 - DNA, 96 bp, Artificial Sequence
  Description of Artificial Sequence: Synthetic primer
aatgatacggcgaccaccgagatctacactatagcctacactctttccctacacgacgctcttccgatctactccacaacatcattcactcacagc

SEQ ID NO: 2095 - DNA, 99 bp, Artificial Sequence
  Description of Artificial Sequence: Synthetic primer
aatgatacggcgaccaccgagatctacactatagcctacactctttccctacacgacgctcttccgatctacatcattgctcttcaaataacaaagcat

SEQ ID NO: 2096 - DNA, 98 bp, Artificial Sequence
  Description of Artificial Sequence: Synthetic primer
aatgatacggcgaccaccgagatctacactatagcctacactctttccctacacgacgctcttccgatctttagatgattgtctttttcctcttgccc

SEQ ID NO: 2097 - DNA, 103 bp, Artificial Sequence
  Description of Artificial Sequence: Synthetic polynucleotide
aatgatacggcgaccaccgagatctacactatagcctacactctttccctacacgacgctcttccgatctcttcaagttgtctttttaatgatcctctattct

SEQ ID NO: 2098 - DNA, 90 bp, Artificial Sequence
  Description of Artificial Sequence: Synthetic primer
aatgatacggcgaccaccgagatctacactatagcctacactctttccctacacgacgctcttccgatctcgtgagtcaccacggctagc

SEQ ID NO: 2099 - DNA, 102 bp, Artificial Sequence
  Description of Artificial Sequence: Synthetic polynucleotide
aatgatacggcgaccaccgagatctacactatagcctacactctttccctacacgacgctcttccgatctgaagttaatgagagacaaattccaactctaat

SEQ ID NO: 2100 - DNA, 90 bp, Artificial Sequence
  Description of Artificial Sequence: Synthetic primer
aatgatacggcgaccaccgagatctacactatagcctacactctttccctacacgacgctcttccgatctaccggagccagacaaacact

SEQ ID NO: 2101 - DNA, 102 bp, Artificial Sequence
  Description of Artificial Sequence: Synthetic polynucleotide
aatgatacggcgaccaccgagatctacactatagcctacactctttccctacacgacgctcttccgatctttactgcatacacattgtgaccttaattttgt

SEQ ID NO: 2102 - DNA, 94 bp, Artificial Sequence
  Description of Artificial Sequence: Synthetic primer
aatgatacggcgaccaccgagatctacactatagcctacactctttccctacacgacgctcttccgatctatactacagtgttacccagctcct

SEQ ID NO: 2103 - DNA, 105 bp, Artificial Sequence
  Description of Artificial Sequence: Synthetic polynucleotide
aatgatacggcgaccaccgagatctacactatagcctacactctttccctacacgacgctcttccgatctggatgataatgatggagaactagatacaccaataa

SEQ ID NO: 2104 - DNA, 96 bp, Artificial Sequence
  Description of Artificial Sequence: Synthetic primer
aatgatacggcgaccaccgagatctacactatagcctacactctttccctacacgacgctcttccgatctgtccacaccttcatctaatgccaaga

SEQ ID NO: 2105 - DNA, 94 bp, Artificial Sequence
  Description of Artificial Sequence: Synthetic primer
aatgatacggcgaccaccgagatctacactatagcctacactctttccctacacgacgctcttccgatcttttgagagtcgttcgattgccagc

SEQ ID NO: 2106 - DNA, 92 bp, Artificial Sequence
  Description of Artificial Sequence: Synthetic primer
aatgatacggcgaccaccgagatctacactatagcctacactctttccctacacgacgctcttccgatctcaaaaaagccagcccagactgc

SEQ ID NO: 2107 - DNA, 99 bp, Artificial Sequence
  Description of Artificial Sequence: Synthetic primer
aatgatacggcgaccaccgagatctacactatagcctacactctttccctacacgacgctcttccgatctcgtgtaagaaaaaatgcagactcaaaaaa

SEQ ID NO: 2108 - DNA, 101 bp, Artificial Sequence
  Description of Artificial Sequence: Synthetic polynucleotide
aatgatacggcgaccaccgagatctacactatagcctacactctttccctacacgacgctcttccgatcttaaagaaaatgaacctatcaaagagactgag

SEQ ID NO: 2109 - DNA, 103 bp, Artificial Sequence
  Description of Artificial Sequence: Synthetic polynucleotide
aatgatacggcgaccaccgagatctacactatagcctacactctttccctacacgacgctcttccgatctagatagaatctgaaagtaaaggaatcaaaggag

SEQ ID NO: 2110 - DNA, 97 bp, Artificial Sequence
  Description of Artificial Sequence: Synthetic primer
aatgatacggcgaccaccgagatctacactatagcctacactctttccctacacgacgctcttccgatctctaagtcctcaggttctggaaaaatgt

SEQ ID NO: 2111 - DNA, 95 bp, Artificial Sequence
  Description of Artificial Sequence: Synthetic primer
aatgatacggcgaccaccgagatctacactatagcctacactctttccctacacgacgctcttccgatctacttggagaagaactggaagttcat

SEQ ID NO: 2112 - DNA, 100 bp, Artificial Sequence
  Description of Artificial Sequence: Synthetic polynucleotide
aatgatacggcgaccaccgagatctacactatagcctacactctttccctacacgacgctcttccgatctatcctgtccctgtatcagagactaatgaaa

SEQ ID NO: 2113 - DNA, 92 bp, Artificial Sequence
  Description of Artificial Sequence: Synthetic primer
aatgatacggcgaccaccgagatctacactatagcctacactctttccctacacgacgctcttccgatctagccctggctcaaggatttctc

SEQ ID NO: 2114 - DNA, 97 bp, Artificial Sequence
  Description of Artificial Sequence: Synthetic primer
aatgatacggcgaccaccgagatctacactatagcctacactctttccctacacgacgctcttccgatcttctcttggtatgtgtttgcctcaaaag

SEQ ID NO: 2115 - DNA, 100 bp, Artificial Sequence
  Description of Artificial Sequence: Synthetic polynucleotide
aatgatacggcgaccaccgagatctacactatagcctacactctttccctacacgacgctcttccgatctgtaaaccaaacaacttccacctctaaagtt

SEQ ID NO: 2116 - DNA, 98 bp, Artificial Sequence
  Description of Artificial Sequence: Synthetic primer
aatgatacggcgaccaccgagatctacactatagcctacactctttccctacacgacgctcttccgatctacacaattagcctggacaataaatgaac

SEQ ID NO: 2117 - DNA, 99 bp, Artificial Sequence
  Description of Artificial Sequence: Synthetic primer
aatgatacggcgaccaccgagatctacactatagcctacactctttccctacacgacgctcttccgatctggtgaacattcttttgaacatgaacctga

SEQ ID NO: 2118 - DNA, 100 bp, Artificial Sequence
  Description of Artificial Sequence: Synthetic polynucleotide
aatgatacggcgaccaccgagatctacactatagcctacactctttccctacacgacgctcttccgatctacagtacagaactttgtaaataagaaagct

SEQ ID NO: 2119 - DNA, 99 bp, Artificial Sequence
  Description of Artificial Sequence: Synthetic primer
aatgatacggcgaccaccgagatctacactatagcctacactctttccctacacgacgctcttccgatctaaagaaggactatccaatgagtctcaaaa

SEQ ID NO: 2120 - DNA, 95 bp, Artificial Sequence
  Description of Artificial Sequence: Synthetic primer
aatgatacggcgaccaccgagatctacactatagcctacactctttccctacacgacgctcttccgatctaatgcgctgggaagaatttgaagga

SEQ ID NO: 2121 - DNA, 92 bp, Artificial Sequence
  Description of Artificial Sequence: Synthetic primer
aatgatacggcgaccaccgagatctacactatagcctacactctttccctacacgacgctcttccgatctccgacaagaccaacctccatgt

SEQ ID NO: 2122 - DNA, 92 bp, Artificial Sequence
  Description of Artificial Sequence: Synthetic primer
aatgatacggcgaccaccgagatctacactatagcctacactctttccctacacgacgctcttccgatctcacccgagtgaatgacagggac

SEQ ID NO: 2123 - DNA, 92 bp, Artificial Sequence
  Description of Artificial Sequence: Synthetic primer
aatgatacggcgaccaccgagatctacactatagcctacactctttccctacacgacgctcttccgatctcactctcaaagggtgggttccc

SEQ ID NO: 2124 - DNA, 88 bp, Artificial Sequence
  Description of Artificial Sequence: Synthetic primer
aatgatacggcgaccaccgagatctacactatagcctacactctttccctacacgacgctcttccgatctatggcccagcctcacacc

SEQ ID NO: 2125 - DNA, 89 bp, Artificial Sequence
  Description of Artificial Sequence: Synthetic primer
aatgatacggcgaccaccgagatctacactatagcctacactctttccctacacgacgctcttccgatctcgtggctgttcgctgctcg

SEQ ID NO: 2126 - DNA, 88 bp, Artificial Sequence; identical to SEQ ID NO: 2124
  Description of Artificial Sequence: Synthetic primer

SEQ ID NO: 2127 - DNA, 90 bp, Artificial Sequence
  Description of Artificial Sequence: Synthetic primer
aatgatacggcgaccaccgagatctacactatagcctacactctttccctacacgacgctcttccgatctgacaccagggctgggagtgg

SEQ ID NO: 2128 - DNA, 93 bp, Artificial Sequence
  Description of Artificial Sequence: Synthetic primer
aatgatacggcgaccaccgagatctacactatagcctacactctttccctacacgacgctcttccgatcttgtcgggtgtcccactgctattc

SEQ ID NO: 2129 - DNA, 92 bp, Artificial Sequence
  Description of Artificial Sequence: Synthetic primer
aatgatacggcgaccaccgagatctacactatagcctacactctttccctacacgacgctcttccgatctcttcctgcctgttcattgtccc

SEQ ID NO: 2130 - DNA, 90 bp, Artificial Sequence
  Description of Artificial Sequence: Synthetic primer
aatgatacggcgaccaccgagatctacactatagcctacactctttccctacacgacgctcttccgatctgctggacattggagcggctc

SEQ ID NO: 2131 - DNA, 89 bp, Artificial Sequence
  Description of Artificial Sequence: Synthetic primer
aatgatacggcgaccaccgagatctacactatagcctacactctttccctacacgacgctcttccgatctggacggagggaagggcctt

SEQ ID NO: 2132 - DNA, 92 bp, Artificial Sequence
  Description of Artificial Sequence: Synthetic primer
aatgatacggcgaccaccgagatctacactatagcctacactctttccctacacgacgctcttccgatcttgtggctctgtacctgtggctg

SEQ ID NO: 2133 - DNA, 94 bp, Artificial Sequence
  Description of Artificial Sequence: Synthetic primer
aatgatacggcgaccaccgagatctacactatagcctacactctttccctacacgacgctcttccgatctcatatagcacaggtacatgcaggc

SEQ ID NO: 2134 - DNA, 93 bp, Artificial Sequence
  Description of Artificial Sequence: Synthetic primer
aatgatacggcgaccaccgagatctacactatagcctacactctttccctacacgacgctcttccgatctttgtgtcctccctctctgacagg

SEQ ID NO: 2135 - DNA, 92 bp, Artificial Sequence
  Description of Artificial Sequence: Synthetic primer
aatgatacggcgaccaccgagatctacactatagcctacactctttccctacacgacgctcttccgatcttaagacaaaggctggtgctgga

SEQ ID NO: 2136 - DNA, 95 bp, Artificial Sequence
  Description of Artificial Sequence: Synthetic primer
aatgatacggcgaccaccgagatctacactatagcctacactctttccctacacgacgctcttccgatctttgtcaacttgagggagggagcttt

SEQ ID NO: 2137 - DNA, 104 bp, Artificial Sequence
  Description of Artificial Sequence: Synthetic polynucleotide
aatgatacggcgaccaccgagatctacactatagcctacactctttccctacacgacgctcttccgatctgaatatctctggttagtttgtaacatcaagtact

SEQ ID NO: 2138 - DNA, 95 bp, Artificial Sequence
  Description of Artificial Sequence: Synthetic primer
aatgatacggcgaccaccgagatctacactatagcctacactctttccctacacgacgctcttccgatctcaattctgaggtgttaaagggagga

SEQ ID NO: 2139 - DNA, 98 bp, Artificial Sequence
  Description of Artificial Sequence: Synthetic primer
aatgatacggcgaccaccgagatctacactatagcctacactctttccctacacgacgctcttccgatctgcaaggtattctgtaaaggttcttggta

SEQ ID NO: 2140 - DNA, 100 bp, Artificial Sequence
  Description of Artificial Sequence: Synthetic polynucleotide
aatgatacggcgaccaccgagatctacactatagcctacactctttccctacacgacgctcttccgatcttgttaagtcttagtcattagggagatacat

SEQ ID NO: 2141 - DNA, 92 bp, Artificial Sequence
  Description of Artificial Sequence: Synthetic primer
aatgatacggcgaccaccgagatctacactatagcctacactctttccctacacgacgctcttccgatcttatgttgccaacacgagctgac

SEQ ID NO: 2142 - DNA, 98 bp, Artificial Sequence
  Description of Artificial Sequence: Synthetic primer
aatgatacggcgaccaccgagatctacactatagcctacactctttccctacacgacgctcttccgatctaaagtgtttgttccaatacagcagatga

SEQ ID NO: 2143 - DNA, 97 bp, Artificial Sequence
  Description of Artificial Sequence: Synthetic primer
aatgatacggcgaccaccgagatctacactatagcctacactctttccctacacgacgctcttccgatctccacagcatctttacattgatgtttct

SEQ ID NO: 2144 - DNA, 93 bp, Artificial Sequence
  Description of Artificial Sequence: Synthetic primer
aatgatacggcgaccaccgagatctacactatagcctacactctttccctacacgacgctcttccgatctcacaaagggaaagaggagaggca

SEQ ID NO: 2145 - DNA, 97 bp, Artificial Sequence
  Description of Artificial Sequence: Synthetic primer
aatgatacggcgaccaccgagatctacactatagcctacactctttccctacacgacgctcttccgatctggtccttactcttcagaaggagataaa

SEQ ID NO: 2146 - DNA, 92 bp, Artificial Sequence
  Description of Artificial Sequence: Synthetic primer
aatgatacggcgaccaccgagatctacactatagcctacactctttccctacacgacgctcttccgatctggacaccacacacacgcatgtg

SEQ ID NO: 2147 - DNA, 101 bp, Artificial Sequence
  Description of Artificial Sequence: Synthetic polynucleotide
aatgatacggcgaccaccgagatctacactatagcctacactctttccctacacgacgctcttccgatctacatttagctcacttctataaatagactggg

SEQ ID NO: 2148 - DNA, 95 bp, Artificial Sequence
  Description of Artificial Sequence: Synthetic primer
aatgatacggcgaccaccgagatctacactatagcctacactctttccctacacgacgctcttccgatctaaatgtgtatgggtgaaagggctag

SEQ ID NO: 2149 - DNA, 96 bp, Artificial Sequence
  Description of Artificial Sequence: Synthetic primer
aatgatacggcgaccaccgagatctacactatagcctacactctttccctacacgacgctcttccgatctgttattacggctaattgtgctcactg

SEQ ID NO: 2150 - DNA, 99 bp, Artificial Sequence
  Description of Artificial Sequence: Synthetic primer
aatgatacggcgaccaccgagatctacactatagcctacactctttccctacacgacgctcttccgatctttcactttcttccatttctatgcttgttt

SEQ ID NO: 2151 - DNA, 89 bp, Artificial Sequence
  Description of Artificial Sequence: Synthetic primer
aatgatacggcgaccaccgagatctacactatagcctacactctttccctacacgacgctcttccgatcttctgctgtgcctgactggc

SEQ ID NO: 2152 - DNA, 98 bp, Artificial Sequence
  Description of Artificial Sequence: Synthetic primer
aatgatacggcgaccaccgagatctacactatagcctacactctttccctacacgacgctcttccgatctgtggctcagtaacaaatgctcctataat

SEQ ID NO: 2153 - DNA, 98 bp, Artificial Sequence
  Description of Artificial Sequence: Synthetic primer
aatgatacggcgaccaccgagatctacactatagcctacactctttccctacacgacgctcttccgatcttcagccttttctacattcattctgtctt

SEQ ID NO: 2154 - DNA, 96 bp, Artificial Sequence
  Description of Artificial Sequence: Synthetic primer
aatgatacggcgaccaccgagatctacactatagcctacactctttccctacacgacgctcttccgatctctctcttttcagtgcctgttaagttg

SEQ ID NO: 2155 - DNA, 102 bp, Artificial Sequence
  Description of Artificial Sequence: Synthetic polynucleotide
aatgatacggcgaccaccgagatctacactatagcctacactctttccctacacgacgctcttccgatctactaaataggaaaataccagcttcatagacaa

SEQ ID NO: 2156 - DNA, 101 bp, Artificial Sequence
  Description of Artificial Sequence: Synthetic polynucleotide
aatgatacggcgaccaccgagatctacactatagcctacactctttccctacacgacgctcttccgatctttggcaaaactataagataaggaatccagca

SEQ ID NO: 2157 - DNA, 100 bp, Artificial Sequence
  Description of Artificial Sequence: Synthetic polynucleotide
aatgatacggcgaccaccgagatctacactatagcctacactctttccctacacgacgctcttccgatctagaagaagaagaagaagaaaacaaatggtt

SEQ ID NO: 2158 - DNA, 96 bp, Artificial Sequence
  Description of Artificial Sequence: Synthetic primer
aatgatacggcgaccaccgagatctacactatagcctacactctttccctacacgacgctcttccgatctaacttcctgagttttcatggacagca

SEQ ID NO: 2159 - DNA, 98 bp, Artificial Sequence
  Description of Artificial Sequence: Synthetic primer
aatgatacggcgaccaccgagatctacactatagcctacactctttccctacacgacgctcttccgatctgttgcttccaacctagcatcattaccaa

SEQ ID NO: 2160 - DNA, 99 bp, Artificial Sequence
  Description of Artificial Sequence: Synthetic primer
aatgatacggcgaccaccgagatctacactatagcctacactctttccctacacgacgctcttccgatctaagctaataatggagccacataacacatt

SEQ ID NO: 2161 - DNA, 101 bp, Artificial Sequence
  Description of Artificial Sequence: Synthetic polynucleotide
aatgatacggcgaccaccgagatctacactatagcctacactctttccctacacgacgctcttccgatctgcataggagataatcataggaatcccaaatt

SEQ ID NO: 2162 - DNA, 100 bp, Artificial Sequence
  Description of Artificial Sequence: Synthetic polynucleotide
aatgatacggcgaccaccgagatctacactatagcctacactctttccctacacgacgctcttccgatcttatttaccaagcattggaggaatatcgtag

SEQ ID NO: 2163 - DNA, 99 bp, Artificial Sequence
  Description of Artificial Sequence: Synthetic primer
aatgatacggcgaccaccgagatctacactatagcctacactctttccctacacgacgctcttccgatctcactggttaaaactaaggtgggatttttt

SEQ ID NO: 2164 - DNA, 92 bp, Artificial Sequence
  Description of Artificial Sequence: Synthetic primer
aatgatacggcgaccaccgagatctacactatagcctacactctttccctacacgacgctcttccgatcttgactctgccgctgtaccaatc

SEQ ID NO: 2165 - DNA, 101 bp, Artificial Sequence
  Description of Artificial Sequence: Synthetic polynucleotide
aatgatacggcgaccaccgagatctacactatagcctacactctttccctacacgacgctcttccgatctcccagtatagaggagactttttgtttttaaa

SEQ ID NO: 2166 - DNA, 92 bp, Artificial Sequence
  Description of Artificial Sequence: Synthetic primer
aatgatacggcgaccaccgagatctacactatagcctacactctttccctacacgacgctcttccgatctaaatacacggtttccagcagct

SEQ ID NO: 2167 - DNA, 94 bp, Artificial Sequence
  Description of Artificial Sequence: Synthetic primer
aatgatacggcgaccaccgagatctacactatagcctacactctttccctacacgacgctcttccgatctattctgcctcatacaggcaattca

SEQ ID NO: 2168 - DNA, 102 bp, Artificial Sequence
  Description of Artificial Sequence: Synthetic polynucleotide
aatgatacggcgaccaccgagatctacactatagcctacactctttccctacacgacgctcttccgatctcacaaagagataagtcaggtatgattaaaaac

SEQ ID NO: 2169 - DNA, 99 bp, Artificial Sequence
  Description of Artificial Sequence: Synthetic primer
aatgatacggcgaccaccgagatctacactatagcctacactctttccctacacgacgctcttccgatctaaaataaactattttctttcctcccaggg

SEQ ID NO: 2170 - DNA, 103 bp, Artificial Sequence
  Description of Artificial Sequence: Synthetic polynucleotide
aatgatacggcgaccaccgagatctacactatagcctacactctttccctacacgacgctcttccgatctgtctgacaaaaaataagtttttgcattctagtg

SEQ ID NO: 2171 - DNA, 98 bp, Artificial Sequence
  Description of Artificial Sequence: Synthetic primer
aatgatacggcgaccaccgagatctacactatagcctacactctttccctacacgacgctcttccgatctgggactactactatatgtgcattgagag

SEQ ID NO: 2172 - DNA, 101 bp, Artificial Sequence
  Description of Artificial Sequence: Synthetic polynucleotide
aatgatacggcgaccaccgagatctacactatagcctacactctttccctacacgacgctcttccgatctaaactgtttctatgagaaaggttgtgagaat

SEQ ID NO: 2173 - DNA, 94 bp, Artificial Sequence
  Description of Artificial Sequence: Synthetic primer
aatgatacggcgaccaccgagatctacactatagcctacactctttccctacacgacgctcttccgatctcctttcaggtctaaatggagccca

SEQ ID NO: 2174 - DNA, 100 bp, Artificial Sequence
  Description of Artificial Sequence: Synthetic polynucleotide
aatgatacggcgaccaccgagatctacactatagcctacactctttccctacacgacgctcttccgatctaagaatgcaggtttaatatccactttgaaa

SEQ ID NO: 2175 - DNA, 103 bp, Artificial Sequence
  Description of Artificial Sequence: Synthetic polynucleotide
aatgatacggcgaccaccgagatctacactatagcctacactctttccctacacgacgctcttccgatctgattgatggtactttaattttgtcactttgtgt

SEQ ID NO: 2176 - DNA, 100 bp, Artificial Sequence
  Description of Artificial Sequence: Synthetic polynucleotide
aatgatacggcgaccaccgagatctacactatagcctacactctttccctacacgacgctcttccgatcttggaaaagaatcaagatgtatgtgctttaa

SEQ ID NO: 2177 - DNA, 103 bp, Artificial Sequence
  Description of Artificial Sequence: Synthetic polynucleotide
aatgatacggcgaccaccgagatctacactatagcctacactctttccctacacgacgctcttccgatctaatcaagctctctgaacataacattaagaagag

SEQ ID NO: 2178 - DNA, 100 bp, Artificial Sequence
  Description of Artificial Sequence: Synthetic polynucleotide
aatgatacggcgaccaccgagatctacactatagcctacactctttccctacacgacgctcttccgatctacaaaagtgcttctggttatttaacagatg

SEQ ID NO: 2179 - DNA, 100 bp, Artificial Sequence
  Description of Artificial Sequence: Synthetic polynucleotide
aatgatacggcgaccaccgagatctacactatagcctacactctttccctacacgacgctcttccgatctaaagctcaagaagcatgtcatggtaatact

SEQ ID NO: 2180 - DNA, 93 bp, Artificial Sequence
  Description of Artificial Sequence: Synthetic primer
aatgatacggcgaccaccgagatctacactatagcctacactctttccctacacgacgctcttccgatcttattgagactgtggtgccaccta

SEQ ID NO: 2181 - DNA, 96 bp, Artificial Sequence
  Description of Artificial Sequence: Synthetic primer
aatgatacggcgaccaccgagatctacactatagcctacactctttccctacacgacgctcttccgatctgcatacccacaaactgtaaatgaaga

SEQ ID NO: 2182 - DNA, 98 bp, Artificial Sequence
  Description of Artificial Sequence: Synthetic primer
aatgatacggcgaccaccgagatctacactatagcctacactctttccctacacgacgctcttccgatctatctgtccaggtatcagatgcttcatta

SEQ ID NO: 2183 - DNA, 101 bp, Artificial Sequence
  Description of Artificial Sequence: Synthetic polynucleotide
aatgatacggcgaccaccgagatctacactatagcctacactctttccctacacgacgctcttccgatctgcttcacctaaaaacgtaaaaatggaaattg

SEQ ID NO: 2184 - DNA, 100 bp, Artificial Sequence
  Description of Artificial Sequence: Synthetic polynucleotide
aatgatacggcgaccaccgagatctacactatagcctacactctttccctacacgacgctcttccgatcttcaaacattaggtcactatttgttgtaagt

SEQ ID NO: 2185 - DNA, 103 bp, Artificial Sequence
  Description of Artificial Sequence: Synthetic polynucleotide
aatgatacggcgaccaccgagatctacactatagcctacactctttccctacacgacgctcttccgatcttgtgtatttacagtaacatggatattctcttag

SEQ ID NO: 2186 - DNA, 94 bp, Artificial Sequence
  Description of Artificial Sequence: Synthetic primer
aatgatacggcgaccaccgagatctacactatagcctacactctttccctacacgacgctcttccgatctgggtctgcaacaaaggcatattcc

SEQ ID NO: 2187 - DNA, 97 bp, Artificial Sequence
  Description of Artificial Sequence: Synthetic primer
aatgatacggcgaccaccgagatctacactatagcctacactctttccctacacgacgctcttccgatctaaacattgatggacatggctctgatga

SEQ ID NO: 2188 - DNA, 92 bp, Artificial Sequence
  Description of Artificial Sequence: Synthetic primer
aatgatacggcgaccaccgagatctacactatagcctacactctttccctacacgacgctcttccgatctattacaggcgtgagccactgtg

SEQ ID NO: 2189 - DNA, 98 bp, Artificial Sequence
  Description of Artificial Sequence: Synthetic primer
aatgatacggcgaccaccgagatctacactatagcctacactctttccctacacgacgctcttccgatcttacagcagactgtggaatgtatggatca

SEQ ID NO: 2190 - DNA, 98 bp, Artificial Sequence
  Description of Artificial Sequence: Synthetic primer
aatgatacggcgaccaccgagatctacactatagcctacactctttccctacacgacgctcttccgatcttggtaaggaaagtttatggactggaaaa

SEQ ID NO: 2191 - DNA, 105 bp, Artificial Sequence
  Description of Artificial Sequence: Synthetic polynucleotide
aatgatacggcgaccaccgagatctacactatagcctacactctttccctacacgacgctcttccgatctctcagcaatgaagtttttatcagtatgatactttg

SEQ ID NO: 2192 - DNA, 97 bp, Artificial Sequence
  Description of Artificial Sequence: Synthetic primer
aatgatacggcgaccaccgagatctacactatagcctacactctttccctacacgacgctcttccgatctatggaatgtgcctttcctaaggaattt

SEQ ID NO: 2193 - DNA, 102 bp, Artificial Sequence
  Description of Artificial Sequence: Synthetic polynucleotide
aatgatacggcgaccaccgagatctacactatagcctacactctttccctacacgacgctcttccgatctcagtttttattctcagttattcagtgacttgt

SEQ ID NO: 2194 - DNA, 98 bp, Artificial Sequence
  Description of Artificial Sequence: Synthetic primer
aatgatacggcgaccaccgagatctacactatagcctacactctttccctacacgacgctcttccgatctttagctgtcttaaagaatggcagactga

SEQ ID NO: 2195 - DNA, 103 bp, Artificial Sequence
  Description of Artificial Sequence: Synthetic polynucleotide
aatgatacggcgaccaccgagatctacactatagcctacactctttccctacacgacgctcttccgatctacttatttactgtcttactaatcttcctaagac

SEQ ID NO: 2196 - DNA, 93 bp, Artificial Sequence
  Description of Artificial Sequence: Synthetic primer
aatgatacggcgaccaccgagatctacactatagcctacactctttccctacacgacgctcttccgatcttttcctctgcccttatcatcgct

SEQ ID NO: 2197 - DNA, 103 bp, Artificial Sequence
  Description of Artificial Sequence: Synthetic polynucleotide
aatgatacggcgaccaccgagatctacactatagcctacactctttccctacacgacgctcttccgatctctggcctgatacaattaacttgaatgttatata

SEQ ID NO: 2198 - DNA, 100 bp, Artificial Sequence
  Description of Artificial Sequence: Synthetic polynucleotide
aatgatacggcgaccaccgagatctacactatagcctacactctttccctacacgacgctcttccgatctcttggttctttagttttagttgcttttgaa

SEQ ID NO: 2199 - DNA, 103 bp, Artificial Sequence
  Description of Artificial Sequence: Synthetic polynucleotide
aatgatacggcgaccaccgagatctacactatagcctacactctttccctacacgacgctcttccgatcttggaacttttttgttctgattgctttttattcc

SEQ ID NO: 2200 - DNA, 95 bp, Artificial Sequence
  Description of Artificial Sequence: Synthetic primer
aatgatacggcgaccaccgagatctacactatagcctacactctttccctacacgacgctcttccgatctaagcaaaatccactactaatgccca

SEQ ID NO: 2201 - DNA, 98 bp, Artificial Sequence
  Description of Artificial Sequence: Synthetic primer
aatgatacggcgaccaccgagatctacactatagcctacactctttccctacacgacgctcttccgatctattttatttcagatttaccagccacggg

SEQ ID NO: 2202 - DNA, 102 bp, Artificial Sequence
  Description of Artificial Sequence: Synthetic polynucleotide
aatgatacggcgaccaccgagatctacactatagcctacactctttccctacacgacgctcttccgatcttcctttcttgcatcttaaaattcatctaacac

SEQ ID NO: 2203 - DNA, 100 bp, Artificial Sequence
  Description of Artificial Sequence: Synthetic polynucleotide
aatgatacggcgaccaccgagatctacactatagcctacactctttccctacacgacgctcttccgatctagatttttctgtgttttctgctagtccaaa

SEQ ID NO: 2204 - DNA, 105 bp, Artificial Sequence
  Description of Artificial Sequence: Synthetic polynucleotide
aatgatacggcgaccaccgagatctacactatagcctacactctttccctacacgacgctcttccgatctgaaatacttttggaaacataaatatgtgggtttgc

SEQ ID NO: 2205 - DNA, 100 bp, Artificial Sequence
  Description of Artificial Sequence: Synthetic polynucleotide
aatgatacggcgaccaccgagatctacactatagcctacactctttccctacacgacgctcttccgatctaactgaaatcacctaacctattaggagtta

SEQ ID NO: 2206 - DNA, 99 bp, Artificial Sequence
  Description of Artificial Sequence: Synthetic primer
aatgatacggcgaccaccgagatctacactatagcctacactctttccctacacgacgctcttccgatcttaattcaatagctgacgaagaacttgcat

SEQ ID NO: 2207 - DNA, 93 bp, Artificial Sequence
  Description of Artificial Sequence: Synthetic primer
aatgatacggcgaccaccgagatctacactatagcctacactctttccctacacgacgctcttccgatctctgggagcccaacaacttctgag

SEQ ID NO: 2208 - DNA, 96 bp, Artificial Sequence
  Description of Artificial Sequence: Synthetic primer
aatgatacggcgaccaccgagatctacactatagcctacactctttccctacacgacgctcttccgatctttcctaagctaactcttcccatctcc

SEQ ID NO: 2209 - DNA, 92 bp, Artificial Sequence
  Description of Artificial Sequence: Synthetic primer
aatgatacggcgaccaccgagatctacactatagcctacactctttccctacacgacgctcttccgatctctggacaccctctttccgttct

SEQ ID NO: 2210 - DNA, 89 bp, Artificial Sequence
  Description of Artificial Sequence: Synthetic primer
aatgatacggcgaccaccgagatctacactatagcctacactctttccctacacgacgctcttccgatctagcctctaccactgcccac

SEQ ID NO: 2211 - DNA, 98 bp, Artificial Sequence
  Description of Artificial Sequence: Synthetic primer
aatgatacggcgaccaccgagatctacactatagcctacactctttccctacacgacgctcttccgatctctctgatattggacccttccctcatatg

SEQ ID NO: 2212 - DNA, 90 bp, Artificial Sequence
  Description of Artificial Sequence: Synthetic primer
aatgatacggcgaccaccgagatctacactatagcctacactctttccctacacgacgctcttccgatctcgtttgtccacagtgctccc

SEQ ID NO: 2213 - DNA, 92 bp, Artificial Sequence
  Description of Artificial Sequence: Synthetic primer
aatgatacggcgaccaccgagatctacactatagcctacactctttccctacacgacgctcttccgatctcgtcctcacacccttgcctctc

SEQ ID NO: 2214 - DNA, 90 bp, Artificial Sequence
  Description of Artificial Sequence: Synthetic primer
aatgatacggcgaccaccgagatctacactatagcctacactctttccctacacgacgctcttccgatctgcacccacttcctgggaaca

SEQ ID NO: 2215 - DNA, 94 bp, Artificial Sequence
  Description of Artificial Sequence: Synthetic primer
aatgatacggcgaccaccgagatctacactatagcctacactctttccctacacgacgctcttccgatctggtaaggttctaccctgatgccac

SEQ ID NO: 2216 - DNA, 94 bp, Artificial Sequence
  Description of Artificial Sequence: Synthetic primer
aatgatacggcgaccaccgagatctacactatagcctacactctttccctacacgacgctcttccgatctttgtcctctctgagcacatctcct

SEQ ID NO: 2217 - DNA, 96 bp, Artificial Sequence
  Description of Artificial Sequence: Synthetic primer
aatgatacggcgaccaccgagatctacactatagcctacactctttccctacacgacgctcttccgatctttcatccatgacctgttcctcatacc

SEQ ID NO: 2218 - DNA, 89 bp, Artificial Sequence
  Description of Artificial Sequence: Synthetic primer
aatgatacggcgaccaccgagatctacactatagcctacactctttccctacacgacgctcttccgatctcctgccctcacctactccc

SEQ ID NO: 2219 - DNA, 90 bp, Artificial Sequence
  Description of Artificial Sequence: Synthetic primer
aatgatacggcgaccaccgagatctacactatagcctacactctttccctacacgacgctcttccgatcttgaatgtcagccctgctcca

SEQ ID NO: 2220 - DNA, 92 bp, Artificial Sequence
  Description of Artificial Sequence: Synthetic primer
aatgatacggcgaccaccgagatctacactatagcctacactctttccctacacgacgctcttccgatctcccacaggagagtttggagctg

SEQ ID NO: 2221 - DNA, 92 bp, Artificial Sequence
  Description of Artificial Sequence: Synthetic primer
aatgatacggcgaccaccgagatctacactatagcctacactctttccctacacgacgctcttccgatctggagtggaggtggagggagagt

SEQ ID NO: 2222 - DNA, 89 bp, Artificial Sequence
  Description of Artificial Sequence: Synthetic primer
aatgatacggcgaccaccgagatctacactatagcctacactctttccctacacgacgctcttccgatctctgcccagcaggagtgaca

SEQ ID NO: 2223 - DNA, 90 bp, Artificial Sequence
  Description of Artificial Sequence: Synthetic primer
aatgatacggcgaccaccgagatctacactatagcctacactctttccctacacgacgctcttccgatcttctcctcccacctgccttgg

SEQ ID NO: 2224 - DNA, 92 bp, Artificial Sequence
  Description of Artificial Sequence: Synthetic primer
aatgatacggcgaccaccgagatctacactatagcctacactctttccctacacgacgctcttccgatctactgatgccctgaccctgttcc

SEQ ID NO: 2225 - DNA, 96 bp, Artificial Sequence
  Description of Artificial Sequence: Synthetic primer
aatgatacggcgaccaccgagatctacactatagcctacactctttccctacacgacgctcttccgatctgcaggagagactgtctaattccctct

SEQ ID NO: 2226 - DNA, 93 bp, Artificial Sequence
  Description of Artificial Sequence: Synthetic primer
aatgatacggcgaccaccgagatctacactatagcctacactctttccctacacgacgctcttccgatctcccttctgagtccctgctcaatc

SEQ ID NO: 2227 - DNA, 92 bp, Artificial Sequence
  Description of Artificial Sequence: Synthetic primer
aatgatacggcgaccaccgagatctacactatagcctacactctttccctacacgacgctcttccgatctattcctgtagctgcctcactgc

SEQ ID NO: 2228 - DNA, 101 bp, Artificial Sequence
  Description of Artificial Sequence: Synthetic polynucleotide
aatgatacggcgaccaccgagatctacactatagcctacactctttccctacacgacgctcttccgatctgctttagtgaaccttttgcatatttgtttgg

SEQ ID NO: 2229 - DNA, 88 bp, Artificial Sequence
  Description of Artificial Sequence: Synthetic primer
aatgatacggcgaccaccgagatctacactatagcctacactctttccctacacgacgctcttccgatctcccgcatctcggacctgt

SEQ ID NO: 2230 - DNA, 90 bp, Artificial Sequence
  Description of Artificial Sequence: Synthetic primer
aatgatacggcgaccaccgagatctacactatagcctacactctttccctacacgacgctcttccgatctgggtcaggtggaccacaggt

SEQ ID NO: 2231 - DNA, 97 bp, Artificial Sequence
  Description of Artificial Sequence: Synthetic primer
aatgatacggcgaccaccgagatctacactatagcctacactctttccctacacgacgctcttccgatctgttgctactctcctgaactctctcact

SEQ ID NO: 2232 - DNA, 99 bp, Artificial Sequence
  Description of Artificial Sequence: Synthetic primer
aatgatacggcgaccaccgagatctacactatagcctacactctttccctacacgacgctcttccgatctgttagtctgttcttttggatagcatgaag

SEQ ID NO: 2233 - DNA, 96 bp, Artificial Sequence
  Description of Artificial Sequence: Synthetic primer
aatgatacggcgaccaccgagatctacactatagcctacactctttccctacacgacgctcttccgatctagacggtaaaataaacaccaagacgt

SEQ ID NO: 2234 - DNA, 97 bp, Artificial Sequence
  Description of Artificial Sequence: Synthetic primer
aatgatacggcgaccaccgagatctacactatagcctacactctttccctacacgacgctcttccgatcttttctagtaactcagcagcatctcagg

SEQ ID NO: 2235 - DNA, 98 bp, Artificial Sequence
  Description of Artificial Sequence: Synthetic primer
aatgatacggcgaccaccgagatctacactatagcctacactctttccctacacgacgctcttccgatctcaggatgttttcaaacttcgcagacaaa

SEQ ID NO: 2236 - DNA, 103 bp, Artificial Sequence
  Description of Artificial Sequence: Synthetic polynucleotide
aatgatacggcgaccaccgagatctacactatagcctacactctttccctacacgacgctcttccgatctcatcctcaatggtcttcaaaaataatttacaag

SEQ ID NO: 2237 - DNA, 98 bp, Artificial Sequence
  Description of Artificial Sequence: Synthetic primer
aatgatacggcgaccaccgagatctacactatagcctacactctttccctacacgacgctcttccgatcttctggaaaagagtaattcacacaagctc

SEQ ID NO: 2238 - DNA, 94 bp, Artificial Sequence
  Description of Artificial Sequence: Synthetic primer
aatgatacggcgaccaccgagatctacactatagcctacactctttccctacacgacgctcttccgatcttgacttgtcacaatgtcaccacat

SEQ ID NO: 2239 - DNA, 101 bp, Artificial Sequence
  Description of Artificial Sequence: Synthetic polynucleotide
aatgatacggcgaccaccgagatctacactatagcctacactctttccctacacgacgctcttccgatcttttggctgtgacttctaagaagaaagaattc

SEQ ID NO: 2240 - DNA, 100 bp, Artificial Sequence
  Description of Artificial Sequence: Synthetic polynucleotide
aatgatacggcgaccaccgagatctacactatagcctacactctttccctacacgacgctcttccgatctgcaagtataaaggaaataagcagcaaagca

SEQ ID NO: 2241 - DNA, 100 bp, Artificial Sequence
  Description of Artificial Sequence: Synthetic polynucleotide
aatgatacggcgaccaccgagatctacactatagcctacactctttccctacacgacgctcttccgatcttacttggtttttttttagttctagcaatgc

SEQ ID NO: 2242 - DNA, 94 bp, Artificial Sequence
  Description of Artificial Sequence: Synthetic primer
aatgatacggcgaccaccgagatctacactatagcctacactctttccctacacgacgctcttccgatctaaagcggttcaagtagcatgtcgc

SEQ ID NO: 2243 - DNA, 103 bp, Artificial Sequence
  Description of Artificial Sequence: Synthetic polynucleotide
aatgatacggcgaccaccgagatctacactatagcctacactctttccctacacgacgctcttccgatctggtaggtagaaaagagatatttttggattactt

SEQ ID NO: 2244 - DNA, 101 bp, Artificial Sequence
  Description of Artificial Sequence: Synthetic polynucleotide
aatgatacggcgaccaccgagatctacactatagcctacactctttccctacacgacgctcttccgatctccaaaattactcatccatatttcacattccc

SEQ ID NO: 2245 - DNA, 102 bp, Artificial Sequence
  Description of Artificial Sequence: Synthetic polynucleotide
aatgatacggcgaccaccgagatctacactatagcctacactctttccctacacgacgctcttccgatctgatcctaagaaaacttcaaagtttaatgtgtg

SEQ ID NO: 2246 - DNA, 104 bp, Artificial Sequence
  Description of Artificial Sequence: Synthetic polynucleotide
aatgatacggcgaccaccgagatctacactatagcctacactctttccctacacgacgctcttccgatctagaaacagcaaaatggtgatattaaaactgactc

SEQ ID NO: 2247 - DNA, 94 bp, Artificial Sequence
  Description of Artificial Sequence: Synthetic primer
aatgatacggcgaccaccgagatctacactatagcctacactctttccctacacgacgctcttccgatcttgttgttctctttgttggagtgca

SEQ ID NO: 2248 - DNA, 100 bp, Artificial Sequence
  Description of Artificial Sequence: Synthetic polynucleotide
aatgatacggcgaccaccgagatctacactatagcctacactctttccctacacgacgctcttccgatcttcccacctcctaaaataatcaagattatca

SEQ ID NO: 2249 - DNA, 93 bp, Artificial Sequence
  Description of Artificial Sequence: Synthetic primer
aatgatacggcgaccaccgagatctacactatagcctacactctttccctacacgacgctcttccgatcttccaaaataaacaccagccagcc

SEQ ID NO: 2250 - DNA, 89 bp, Artificial Sequence
  Description of Artificial Sequence: Synthetic primer
aatgatacggcgaccaccgagatctacactatagcctacactctttccctacacgacgctcttccgatctttcagactccagcccgctc

SEQ ID NO: 2251 - DNA, 92 bp, Artificial Sequence
  Description of Artificial Sequence: Synthetic primer
aatgatacggcgaccaccgagatctacactatagcctacactctttccctacacgacgctcttccgatctcgagtcacccggttccatctac

SEQ ID NO: 2252 - DNA, 94 bp, Artificial Sequence
  Description of Artificial Sequence: Synthetic primer
aatgatacggcgaccaccgagatctacactatagcctacactctttccctacacgacgctcttccgatcttaatctctgtgatttctgccctgc

SEQ ID NO: 2253 - DNA, 101 bp, Artificial Sequence
  Description of Artificial Sequence: Synthetic polynucleotide
aatgatacggcgaccaccgagatctacactatagcctacactctttccctacacgacgctcttccgatcttgaattgtcttatcttgttcctcatcttctt

SEQ ID NO: 2254 - DNA, 94 bp, Artificial Sequence
  Description of Artificial Sequence: Synthetic primer
aatgatacggcgaccaccgagatctacactatagcctacactctttccctacacgacgctcttccgatctaggcaaggttttctacagcatcac

SEQ ID NO: 2255 - DNA, 95 bp, Artificial Sequence
  Description of Artificial Sequence: Synthetic primer
aatgatacggcgaccaccgagatctacactatagcctacactctttccctacacgacgctcttccgatctctcaagtcaccctcacttggttctt

SEQ ID NO: 2256 - DNA, 96 bp, Artificial Sequence
  Description of Artificial Sequence: Synthetic primer
aatgatacggcgaccaccgagatctacactatagcctacactctttccctacacgacgctcttccgatctgattaagcagtattgacccagtccca

SEQ ID NO: 2257 - DNA, 90 bp, Artificial Sequence
  Description of Artificial Sequence: Synthetic primer
aatgatacggcgaccaccgagatctacactatagcctacactctttccctacacgacgctcttccgatcttgtgttgggctgggctaggc

SEQ ID NO: 2258 - DNA, 100 bp, Artificial Sequence
  Description of Artificial Sequence: Synthetic polynucleotide
aatgatacggcgaccaccgagatctacactatagcctacactctttccctacacgacgctcttccgatctactttgtaaatgacacatctctttgctctg

SEQ ID NO: 2259 - DNA, 99 bp, Artificial Sequence
  Description of Artificial Sequence: Synthetic primer
aatgatacggcgaccaccgagatctacactatagcctacactctttccctacacgacgctcttccgatctttgtttttaacttcattgtttctgctctc

SEQ ID NO: 2260 - DNA, 94 bp, Artificial Sequence
  Description of Artificial Sequence: Synthetic primer
aatgatacggcgaccaccgagatctacactatagcctacactctttccctacacgacgctcttccgatctgctggtcctattctaaaagccaga

SEQ ID NO: 2261 - DNA, 92 bp, Artificial Sequence
  Description of Artificial Sequence: Synthetic primer
aatgatacggcgaccaccgagatctacactatagcctacactctttccctacacgacgctcttccgatctccaagctgccacattttctgtg

SEQ ID NO: 2262 - DNA, 100 bp, Artificial Sequence
  Description of Artificial Sequence: Synthetic polynucleotide
aatgatacggcgaccaccgagatctacactatagcctacactctttccctacacgacgctcttccgatctctggtctcatcatttctttttattgctttc

SEQ ID NO: 2263 - DNA, 94 bp, Artificial Sequence
  Description of Artificial Sequence: Synthetic primer
aatgatacggcgaccaccgagatctacactatagcctacactctttccctacacgacgctcttccgatcttctttggctctcaacacttgctct

SEQ ID NO: 2264 - DNA, 102 bp, Artificial Sequence
  Description of Artificial Sequence: Synthetic polynucleotide
aatgatacggcgaccaccgagatctacactatagcctacactctttccctacacgacgctcttccgatctgtgtatgactatttctttcctactcttcattg

SEQ ID NO: 2265 - DNA, 95 bp, Artificial Sequence
  Description of Artificial Sequence: Synthetic primer
aatgatacggcgaccaccgagatctacactatagcctacactctttccctacacgacgctcttccgatctgcccttcctttcactaaaagatgct

SEQ ID NO: 2266 - DNA, 96 bp, Artificial Sequence
  Description of Artificial Sequence: Synthetic primer
aatgatacggcgaccaccgagatctacactatagcctacactctttccctacacgacgctcttccgatctggaacttttttcccttcttcaggtca

SEQ ID NO: 2267 - DNA, 92 bp, Artificial Sequence
  Description of Artificial Sequence: Synthetic primer
aatgatacggcgaccaccgagatctacactatagcctacactctttccctacacgacgctcttccgatctagtctccagcaagtcgggatcg

SEQ ID NO: 2268 - DNA, 90 bp, Artificial Sequence
  Description of Artificial Sequence: Synthetic primer
aatgatacggcgaccaccgagatctacactatagcctacactctttccctacacgacgctcttccgatctcctaccagtccagcacccgg

SEQ ID NO: 2269 - DNA, 103 bp, Artificial Sequence
  Description of Artificial Sequence: Synthetic polynucleotide
aatgatacggcgaccaccgagatctacactatagcctacactctttccctacacgacgctcttccgatctgttttcctccatatactactgtagtccattcat

SEQ ID NO: 2270 - DNA, 102 bp, Artificial Sequence
  Description of Artificial Sequence: Synthetic polynucleotide
aatgatacggcgaccaccgagatctacactatagcctacactctttccctacacgacgctcttccgatctaacacagaggtaaaaaattcttcagatacagg

SEQ ID NO: 2271 - DNA, 95 bp, Artificial Sequence
  Description of Artificial Sequence: Synthetic primer
aatgatacggcgaccaccgagatctacactatagcctacactctttccctacacgacgctcttccgatctaagacatctgctgtgtcctctcagg

SEQ ID NO: 2272 - DNA, 105 bp, Artificial Sequence
  Description of Artificial Sequence: Synthetic polynucleotide
aatgatacggcgaccaccgagatctacactatagcctacactctttccctacacgacgctcttccgatctgcgtatctttaattgtaattttgtcatctcttctc

SEQ ID NO: 2273 - DNA, 100 bp, Artificial Sequence
  Description of Artificial Sequence: Synthetic polynucleotide
aatgatacggcgaccaccgagatctacactatagcctacactctttccctacacgacgctcttccgatctgcccggccttcattttcttaaataactatt

SEQ ID NO: 2274 - DNA, 91 bp, Artificial Sequence
  Description of Artificial Sequence: Synthetic primer
aatgatacggcgaccaccgagatctacactatagcctacactctttccctacacgacgctcttccgatcttgctggttcacaatagtggcc

SEQ ID NO: 2275 - DNA, 102 bp, Artificial Sequence
  Description of Artificial Sequence: Synthetic polynucleotide
aatgatacggcgaccaccgagatctacactatagcctacactctttccctacacgacgctcttccgatctgacttgaggcattgttatttcagcattctttt

SEQ ID NO: 2276 - DNA, 94 bp, Artificial Sequence
  Description of Artificial Sequence: Synthetic primer
aatgatacggcgaccaccgagatctacactatagcctacactctttccctacacgacgctcttccgatctaggccactgctatggcttatgaaa

SEQ ID NO: 2277 - DNA, 99 bp, Artificial Sequence
  Description of Artificial Sequence: Synthetic primer
aatgatacggcgaccaccgagatctacactatagcctacactctttccctacacgacgctcttccgatctatcagaagccactgtaagtttatgtcatg

SEQ ID NO: 2278 - DNA, 101 bp, Artificial Sequence
  Description of Artificial Sequence: Synthetic polynucleotide
aatgatacggcgaccaccgagatctacactatagcctacactctttccctacacgacgctcttccgatctaagaatttctcttctgacctctcaattttac

SEQ ID NO: 2279 - DNA, 100 bp, Artificial Sequence
  Description of Artificial Sequence: Synthetic polynucleotide
aatgatacggcgaccaccgagatctacactatagcctacactctttccctacacgacgctcttccgatcttccattgttcttgcttttgctttgttttca

SEQ ID NO: 2280 - DNA, 97 bp, Artificial Sequence
  Description of Artificial Sequence: Synthetic primer
aatgatacggcgaccaccgagatctacactatagcctacactctttccctacacgacgctcttccgatcttgtagggtcattgtgaacttgtccttt

SEQ ID NO: 2281 - DNA, 96 bp, Artificial Sequence
  Description of Artificial Sequence: Synthetic primer
aatgatacggcgaccaccgagatctacactatagcctacactctttccctacacgacgctcttccgatctctgctgcattcccttacatatttccc

SEQ ID NO: 2282 - DNA, 100 bp, Artificial Sequence
  Description of Artificial Sequence: Synthetic polynucleotide
aatgatacggcgaccaccgagatctacactatagcctacactctttccctacacgacgctcttccgatcttctcatcgtcttatattggcttcactgtct

SEQ ID NO: 2283 - DNA, 96 bp, Artificial Sequence
  Description of Artificial Sequence: Synthetic primer
aatgatacggcgaccaccgagatctacactatagcctacactctttccctacacgacgctcttccgatcttatattggcagttctcttgagtcagc

SEQ ID NO: 2284 - DNA, 95 bp, Artificial Sequence
  Description of Artificial Sequence: Synthetic primer
aatgatacggcgaccaccgagatctacactatagcctacactctttccctacacgacgctcttccgatctgttgcacagtgtgtgtgtttgtgtt

SEQ ID NO: 2285 - DNA, 90 bp, Artificial Sequence
  Description of Artificial Sequence: Synthetic primer
aatgatacggcgaccaccgagatctacactatagcctacactctttccctacacgacgctcttccgatctggacctccgttttgccaggg

SEQ ID NO: 2286 - DNA, 88 bp, Artificial Sequence
  Description of Artificial Sequence: Synthetic primer
aatgatacggcgaccaccgagatctacactatagcctacactctttccctacacgacgctcttccgatctagctgcccaggaagagcc

SEQ ID NO: 2287 - DNA, 90 bp, Artificial Sequence
  Description of Artificial Sequence: Synthetic primer
aatgatacggcgaccaccgagatctacactatagcctacactctttccctacacgacgctcttccgatctcgcatcacgggaagctcctg

SEQ ID NO: 2288 - DNA, 93 bp, Artificial Sequence
  Description of Artificial Sequence: Synthetic primer
aatgatacggcgaccaccgagatctacactatagcctacactctttccctacacgacgctcttccgatctttcgtggcctctaagatgaagga

SEQ ID NO: 2289 - DNA, 89 bp, Artificial Sequence
  Description of Artificial Sequence: Synthetic primer
aatgatacggcgaccaccgagatctacactatagcctacactctttccctacacgacgctcttccgatctggccgctcaccctgtgttc

SEQ ID NO: 2290 - DNA, 92 bp, Artificial Sequence
  Description of Artificial Sequence: Synthetic primer
aatgatacggcgaccaccgagatctacactatagcctacactctttccctacacgacgctcttccgatctctcacagcctccttccctctct

SEQ ID NO: 2291 - DNA, 89 bp, Artificial Sequence
  Description of Artificial Sequence: Synthetic primer
aatgatacggcgaccaccgagatctacactatagcctacactctttccctacacgacgctcttccgatctgggtcatggcacctgggaa

SEQ ID NO: 2292 - DNA, 90 bp, Artificial Sequence
  Description of Artificial Sequence: Synthetic primer
aatgatacggcgaccaccgagatctacactatagcctacactctttccctacacgacgctcttccgatctgaggaggtggacctggcttg

SEQ ID NO: 2293 - DNA, 88 bp, Artificial Sequence
  Description of Artificial Sequence: Synthetic primer
aatgatacggcgaccaccgagatctacactatagcctacactctttccctacacgacgctcttccgatctagggtccgccttctgcag

SEQ ID NO: 2294 - DNA, 93 bp, Artificial Sequence
  Description of Artificial Sequence: Synthetic primer
aatgatacggcgaccaccgagatctacactatagcctacactctttccctacacgacgctcttccgatctatctctgctttcccaacctctcc

SEQ ID NO: 2295 - DNA, 99 bp, Artificial Sequence
  Description of Artificial Sequence: Synthetic primer
aatgatacggcgaccaccgagatctacactatagcctacactctttccctacacgacgctcttccgatcttaaactctacctggtttttgaatttctgc

SEQ ID NO: 2296 - DNA, 94 bp, Artificial Sequence
  Description of Artificial Sequence: Synthetic primer
aatgatacggcgaccaccgagatctacactatagcctacactctttccctacacgacgctcttccgatcttgctcactgtaatggagaaacaca

SEQ ID NO: 2297 - DNA, 95 bp, Artificial Sequence
  Description of Artificial Sequence: Synthetic primer
aatgatacggcgaccaccgagatctacactatagcctacactctttccctacacgacgctcttccgatctactgagatgcgggaatttccatacc

SEQ ID NO: 2298 - DNA, 94 bp, Artificial Sequence
  Description of Artificial Sequence: Synthetic primer
aatgatacggcgaccaccgagatctacactatagcctacactctttccctacacgacgctcttccgatctcgtgggtcttggtatttcctcttt

SEQ ID NO: 2299 - DNA, 94 bp, Artificial Sequence
  Description of Artificial Sequence: Synthetic primer
aatgatacggcgaccaccgagatctacactatagcctacactctttccctacacgacgctcttccgatctggtagaaggagttctggtttcctg

SEQ ID NO: 2300 - DNA, 93 bp, Artificial Sequence
  Description of Artificial Sequence: Synthetic primer
aatgatacggcgaccaccgagatctacactatagcctacactctttccctacacgacgctcttccgatctggcagcttttcttccttccatgg

SEQ ID NO: 2301 - DNA, 91 bp, Artificial Sequence
  Description of Artificial Sequence: Synthetic primer
aatgatacggcgaccaccgagatctacactatagcctacactctttccctacacgacgctcttccgatcttgtgcccacagccatctccag

SEQ ID NO: 2302 - DNA, 101 bp, Artificial Sequence
  Description of Artificial Sequence: Synthetic polynucleotide
aatgatacggcgaccaccgagatctacactatagcctacactctttccctacacgacgctcttccgatctagcagaaagaggactcagaatagaaaatctt

SEQ ID NO: 2303 - DNA, 96 bp, Artificial Sequence
  Description of Artificial Sequence: Synthetic primer
aatgatacggcgaccaccgagatctacactatagcctacactctttccctacacgacgctcttccgatctaattcaaggtagtccagggtatgtgg

SEQ ID NO: 2304 - DNA, 94 bp, Artificial Sequence
  Description of Artificial Sequence: Synthetic primer
aatgatacggcgaccaccgagatctacactatagcctacactctttccctacacgacgctcttccgatctcatctggtagctgtagattctggc

SEQ ID NO: 2305 - DNA, 96 bp, Artificial Sequence; identical to SEQ ID NO: 2303
  Description of Artificial Sequence: Synthetic primer

SEQ ID NO: 2306 - DNA, 93 bp, Artificial Sequence
  Description of Artificial Sequence: Synthetic primer
aatgatacggcgaccaccgagatctacactatagcctacactctttccctacacgacgctcttccgatcttggcgcatcagatcctagtttca

SEQ ID NO: 2307 - DNA, 94 bp, Artificial Sequence
  Description of Artificial Sequence: Synthetic primer
aatgatacggcgaccaccgagatctacactatagcctacactctttccctacacgacgctcttccgatctcttctcaccggacaacattgggat

SEQ ID NO: 2308 - DNA, 93 bp, Artificial Sequence
  Description of Artificial Sequence: Synthetic primer
aatgatacggcgaccaccgagatctacactatagcctacactctttccctacacgacgctcttccgatcttctcctactcccaaccagaaccc

SEQ ID NO: 2309 - DNA, 95 bp, Artificial Sequence
  Description of Artificial Sequence: Synthetic primer
aatgatacggcgaccaccgagatctacactatagcctacactctttccctacacgacgctcttccgatctccacttctctacagatcatcacacc

SEQ ID NO: 2310 - DNA, 91 bp, Artificial Sequence
  Description of Artificial Sequence: Synthetic primer
aatgatacggcgaccaccgagatctacactatagcctacactctttccctacacgacgctcttccgatctgggcttaaataggccaggccc

SEQ ID NO: 2311 - DNA, 90 bp, Artificial Sequence
  Description of Artificial Sequence: Synthetic primer
aatgatacggcgaccaccgagatctacactatagcctacactctttccctacacgacgctcttccgatctgctgtggagaggcagggagg

SEQ ID NO: 2312 - DNA, 92 bp, Artificial Sequence
  Description of Artificial Sequence: Synthetic primer
aatgatacggcgaccaccgagatctacactatagcctacactctttccctacacgacgctcttccgatctaagtgtcctgacccaccctcta

SEQ ID NO: 2313 - DNA, 95 bp, Artificial Sequence
  Description of Artificial Sequence: Synthetic primer
aatgatacggcgaccaccgagatctacactatagcctacactctttccctacacgacgctcttccgatctacaccttatagtctggcagcttggt

SEQ ID NO: 2314 - DNA, 90 bp, Artificial Sequence
  Description of Artificial Sequence: Synthetic primer
aatgatacggcgaccaccgagatctacactatagcctacactctttccctacacgacgctcttccgatctctcccagagggctcaaggca

SEQ ID NO: 2315 - DNA, 96 bp, Artificial Sequence
  Description of Artificial Sequence: Synthetic primer
aatgatacggcgaccaccgagatctacactatagcctacactctttccctacacgacgctcttccgatctgaggctcagagaggagaggaaaataa

SEQ ID NO: 2316 - DNA, 92 bp, Artificial Sequence
  Description of Artificial Sequence: Synthetic primer
aatgatacggcgaccaccgagatctacactatagcctacactctttccctacacgacgctcttccgatctgggaaagaaggtgcctctgcaa

SEQ ID NO: 2317 - DNA, 94 bp, Artificial Sequence
  Description of Artificial Sequence: Synthetic primer
aatgatacggcgaccaccgagatctacactatagcctacactctttccctacacgacgctcttccgatctgggacatggagaagggcctttaaa

SEQ ID NO: 2318 - DNA, 90 bp, Artificial Sequence
  Description of Artificial Sequence: Synthetic primer
aatgatacggcgaccaccgagatctacactatagcctacactctttccctacacgacgctcttccgatctgttggagctgagggactccc

SEQ ID NO: 2319 - DNA, 98 bp, Artificial Sequence
  Description of Artificial Sequence: Synthetic primer
aatgatacggcgaccaccgagatctacactatagcctacactctttccctacacgacgctcttccgatctccttcttcccaagaagtaccctgtttat

SEQ ID NO: 2320 - DNA, 93 bp, Artificial Sequence
  Description of Artificial Sequence: Synthetic primer
aatgatacggcgaccaccgagatctacactatagcctacactctttccctacacgacgctcttccgatctttacaccgaatgcagactccgac

SEQ ID NO: 2321 - DNA, 89 bp, Artificial Sequence
  Description of Artificial Sequence: Synthetic primer
aatgatacggcgaccaccgagatctacactatagcctacactctttccctacacgacgctcttccgatcttctcccggagggcggaact

SEQ ID NO: 2322 - DNA, 92 bp, Artificial Sequence
  Description of Artificial Sequence: Synthetic primer
aatgatacggcgaccaccgagatctacactatagcctacactctttccctacacgacgctcttccgatctgctcttgcaggaacatctcgag

SEQ ID NO: 2323 - DNA, 91 bp, Artificial Sequence
  Description of Artificial Sequence: Synthetic primer
aatgatacggcgaccaccgagatctacactatagcctacactctttccctacacgacgctcttccgatctagggtgttctccgcaggatca

SEQ ID NO: 2324 - DNA, 92 bp, Artificial Sequence
  Description of Artificial Sequence: Synthetic primer
aatgatacggcgaccaccgagatctacactatagcctacactctttccctacacgacgctcttccgatctgtgtctcactggcacagtgcag

SEQ ID NO: 2325 - DNA, 96 bp, Artificial Sequence
  Description of Artificial Sequence: Synthetic primer
aatgatacggcgaccaccgagatctacactatagcctacactctttccctacacgacgctcttccgatctatgttttaatgctatggacactggtg

SEQ ID NO: 2326 - DNA, 96 bp, Artificial Sequence
  Description of Artificial Sequence: Synthetic primer
aatgatacggcgaccaccgagatctacactatagcctacactctttccctacacgacgctcttccgatcttcaaggaaagcagagtgaaacaaaat

SEQ ID NO: 2327 - DNA, 96 bp, Artificial Sequence
  Description of Artificial Sequence: Synthetic primer
aatgatacggcgaccaccgagatctacactatagcctacactctttccctacacgacgctcttccgatctaataaaaggacagcactctctcactc

SEQ ID NO: 2328 - DNA, 97 bp, Artificial Sequence
  Description of Artificial Sequence: Synthetic primer
aatgatacggcgaccaccgagatctacactatagcctacactctttccctacacgacgctcttccgatcttgcctgataagacatgaagatgattct

SEQ ID NO: 2329 - DNA, 89 bp, Artificial Sequence
  Description of Artificial Sequence: Synthetic primer
aatgatacggcgaccaccgagatctacactatagcctacactctttccctacacgacgctcttccgatctctgaggattcccggctcgg

SEQ ID NO: 2330 - DNA, 88 bp, Artificial Sequence
  Description of Artificial Sequence: Synthetic primer
aatgatacggcgaccaccgagatctacactatagcctacactctttccctacacgacgctcttccgatcttcgcgggccttgaacacc

SEQ ID NO: 2331 - DNA, 88 bp, Artificial Sequence
  Description of Artificial Sequence: Synthetic primer
aatgatacggcgaccaccgagatctacactatagcctacactctttccctacacgacgctcttccgatcttcagtcgggctggtgctg

SEQ ID NO: 2332 - DNA, 100 bp, Artificial Sequence
  Description of Artificial Sequence: Synthetic polynucleotide
aatgatacggcgaccaccgagatctacactatagcctacactctttccctacacgacgctcttccgatctaaagtttttccttgtacgacattgtatgat

SEQ ID NO: 2333 - DNA, 99 bp, Artificial Sequence
  Description of Artificial Sequence: Synthetic primer
aatgatacggcgaccaccgagatctacactatagcctacactctttccctacacgacgctcttccgatcttgtattgcctttgaattacaaatggtgtg

SEQ ID NO: 2334 - DNA, 97 bp, Artificial Sequence
  Description of Artificial Sequence: Synthetic primer
aatgatacggcgaccaccgagatctacactatagcctacactctttccctacacgacgctcttccgatctgaatccctgagtgtttctttttctgtt

SEQ ID NO: 2335 - DNA, 104 bp, Artificial Sequence
  Description of Artificial Sequence: Synthetic polynucleotide
aatgatacggcgaccaccgagatctacactatagcctacactctttccctacacgacgctcttccgatctccactactgtctactgaaaaaaaacactattttg

SEQ ID NO: 2336 - DNA, 100 bp, Artificial Sequence
  Description of Artificial Sequence: Synthetic polynucleotide
aatgatacggcgaccaccgagatctacactatagcctacactctttccctacacgacgctcttccgatctgaattgagcacatttttcatcttactgaat

SEQ ID NO: 2337 - DNA, 99 bp, Artificial Sequence
  Description of Artificial Sequence: Synthetic primer
aatgatacggcgaccaccgagatctacactatagcctacactctttccctacacgacgctcttccgatcttaccaaagctattggtgagtagaactaat

SEQ ID NO: 2338 - DNA, 100 bp, Artificial Sequence
  Description of Artificial Sequence: Synthetic polynucleotide
aatgatacggcgaccaccgagatctacactatagcctacactctttccctacacgacgctcttccgatctttttgcacctttctttttcttttttccttg

SEQ ID NO: 2339 - DNA, 101 bp, Artificial Sequence
  Description of Artificial Sequence: Synthetic polynucleotide
aatgatacggcgaccaccgagatctacactatagcctacactctttccctacacgacgctcttccgatctattctcaagaataggaacttaggcaacataa

SEQ ID NO: 2340 - DNA, 97 bp, Artificial Sequence
  Description of Artificial Sequence: Synthetic primer
aatgatacggcgaccaccgagatctacactatagcctacactctttccctacacgacgctcttccgatcttcatcagaaggactttagccaatgtac

SEQ ID NO: 2341 - DNA, 98 bp, Artificial Sequence
  Description of Artificial Sequence: Synthetic primer
aatgatacggcgaccaccgagatctacactatagcctacactctttccctacacgacgctcttccgatctgctgaaagataactgtgagaagcaatac

SEQ ID NO: 2342 - DNA, 98 bp, Artificial Sequence
  Description of Artificial Sequence: Synthetic primer
aatgatacggcgaccaccgagatctacactatagcctacactctttccctacacgacgctcttccgatctagaatctcctaaatgaagcatttggaat

SEQ ID NO: 2343 - DNA, 92 bp, Artificial Sequence
  Description of Artificial Sequence: Synthetic primer
aatgatacggcgaccaccgagatctacactatagcctacactctttccctacacgacgctcttccgatctcacccagggaatcaagacagca

SEQ ID NO: 2344 - DNA, 96 bp, Artificial Sequence
  Description of Artificial Sequence: Synthetic primer
aatgatacggcgaccaccgagatctacactatagcctacactctttccctacacgacgctcttccgatctatcacacttttccctcatctcctttc

SEQ ID NO: 2345 - DNA, 92 bp, Artificial Sequence
  Description of Artificial Sequence: Synthetic primer
aatgatacggcgaccaccgagatctacactatagcctacactctttccctacacgacgctcttccgatctgcctctcgggaactacaagtcc

SEQ ID NO: 2346 - DNA, 101 bp, Artificial Sequence
  Description of Artificial Sequence: Synthetic polynucleotide
aatgatacggcgaccaccgagatctacactatagcctacactctttccctacacgacgctcttccgatctccctttttgtgatgaagtttccaaatacgag

SEQ ID NO: 2347 - DNA, 89 bp, Artificial Sequence
  Description of Artificial Sequence: Synthetic primer
aatgatacggcgaccaccgagatctacactatagcctacactctttccctacacgacgctcttccgatctgtctccctttccgcctgca

SEQ ID NO: 2348 - DNA, 92 bp, Artificial Sequence
  Description of Artificial Sequence: Synthetic primer
aatgatacggcgaccaccgagatctacactatagcctacactctttccctacacgacgctcttccgatctgctcactcttgaccactttccc

SEQ ID NO: 2349 - DNA, 103 bp, Artificial Sequence
  Description of Artificial Sequence: Synthetic polynucleotide
aatgatacggcgaccaccgagatctacactatagcctacactctttccctacacgacgctcttccgatctgttttcttgactttttcttctttctattcctgc

SEQ ID NO: 2350 - DNA, 95 bp, Artificial Sequence
  Description of Artificial Sequence: Synthetic primer
aatgatacggcgaccaccgagatctacactatagcctacactctttccctacacgacgctcttccgatcttaatgtgcttatcactcgtgatggg

SEQ ID NO: 2351 - DNA, 103 bp, Artificial Sequence; identical to SEQ ID NO: 2349
  Description of Artificial Sequence: Synthetic polynucleotide

SEQ ID NO: 2352 - DNA, 91 bp, Artificial Sequence
  Description of Artificial Sequence: Synthetic primer
aatgatacggcgaccaccgagatctacactatagcctacactctttccctacacgacgctcttccgatctcccaactgccagggcttcttg

SEQ ID NO: 2353 - DNA, 94 bp, Artificial Sequence
  Description of Artificial Sequence: Synthetic primer
aatgatacggcgaccaccgagatctacactatagcctacactctttccctacacgacgctcttccgatctcactaaaggacccactcttgccct

SEQ ID NO: 2354 - DNA, 90 bp, Artificial Sequence
  Description of Artificial Sequence: Synthetic primer
aatgatacggcgaccaccgagatctacactatagcctacactctttccctacacgacgctcttccgatctgtgcgctcttcttcccaggg

SEQ ID NO: 2355 - DNA, 93 bp, Artificial Sequence
  Description of Artificial Sequence: Synthetic primer
aatgatacggcgaccaccgagatctacactatagcctacactctttccctacacgacgctcttccgatctgactccatattctctcaacgccc

SEQ ID NO: 2356 - DNA, 88 bp, Artificial Sequence
  Description of Artificial Sequence: Synthetic primer
aatgatacggcgaccaccgagatctacactatagcctacactctttccctacacgacgctcttccgatcttacttggcaccaccgcgc

SEQ ID NO: 2357 - DNA, 94 bp, Artificial Sequence
  Description of Artificial Sequence: Synthetic primer
aatgatacggcgaccaccgagatctacactatagcctacactctttccctacacgacgctcttccgatctgtttctcagagcctctctggttct

SEQ ID NO: 2358 - DNA, 89 bp, Artificial Sequence
  Description of Artificial Sequence: Synthetic primer
aatgatacggcgaccaccgagatctacactatagcctacactctttccctacacgacgctcttccgatcttcctcggcggaatcccgta

SEQ ID NO: 2359 - DNA, 99 bp, Artificial Sequence
  Description of Artificial Sequence: Synthetic primer
aatgatacggcgaccaccgagatctacactatagcctacactctttccctacacgacgctcttccgatctcagggtacaaattctcagatcatcagtcc

SEQ ID NO: 2360 - DNA, 89 bp, Artificial Sequence
  Description of Artificial Sequence: Synthetic primer
aatgatacggcgaccaccgagatctacactatagcctacactctttccctacacgacgctcttccgatctcagcaccaccagcgtgtcc

SEQ ID NO: 2361 - DNA, 88 bp, Artificial Sequence
  Description of Artificial Sequence: Synthetic primer
aatgatacggcgaccaccgagatctacactatagcctacactctttccctacacgacgctcttccgatcttccagagtcgcccgccat

SEQ ID NO: 2362 - DNA, 93 bp, Artificial Sequence
  Description of Artificial Sequence: Synthetic primer
aatgatacggcgaccaccgagatctacactatagcctacactctttccctacacgacgctcttccgatctggacttttcgagggcctttccta

SEQ ID NO: 2363 - DNA, 89 bp, Artificial Sequence
  Description of Artificial Sequence: Synthetic primer
aatgatacggcgaccaccgagatctacactatagcctacactctttccctacacgacgctcttccgatctaaaccactccctgggtccc

SEQ ID NO: 2364 - DNA, 90 bp, Artificial Sequence
  Description of Artificial Sequence: Synthetic primer
aatgatacggcgaccaccgagatctacactatagcctacactctttccctacacgacgctcttccgatctgcaggtgcatggtggtctgg

SEQ ID NO: 2365 - DNA, 90 bp, Artificial Sequence
  Description of Artificial Sequence: Synthetic primer
aatgatacggcgaccaccgagatctacactatagcctacactctttccctacacgacgctcttccgatctggccaggaactcgtcgttga

SEQ ID NO: 2366 - DNA, 91 bp, Artificial Sequence
  Description of Artificial Sequence: Synthetic primer
aatgatacggcgaccaccgagatctacactatagcctacactctttccctacacgacgctcttccgatctgggagagtggtactccctgtc

SEQ ID NO: 2367 - DNA, 89 bp, Artificial Sequence
  Description of Artificial Sequence: Synthetic primer
aatgatacggcgaccaccgagatctacactatagcctacactctttccctacacgacgctcttccgatctacccgctctctcctgtcct

SEQ ID NO: 2368 - DNA, 91 bp, Artificial Sequence
  Description of Artificial Sequence: Synthetic primer
aatgatacggcgaccaccgagatctacactatagcctacactctttccctacacgacgctcttccgatcttgtccttttccctccctggga

SEQ ID NO: 2369 - DNA, 88 bp, Artificial Sequence
  Description of Artificial Sequence: Synthetic primer
aatgatacggcgaccaccgagatctacactatagcctacactctttccctacacgacgctcttccgatctaaccagaggagccagccc

SEQ ID NO: 2370 - DNA, 95 bp, Artificial Sequence
  Description of Artificial Sequence: Synthetic primer
aatgatacggcgaccaccgagatctacactatagcctacactctttccctacacgacgctcttccgatctcattgcccttgacaatgtagttgga

SEQ ID NO: 2371 - DNA, 92 bp, Artificial Sequence
  Description of Artificial Sequence: Synthetic primer
aatgatacggcgaccaccgagatctacactatagcctacactctttccctacacgacgctcttccgatctacagacctgggtggctatgagc

SEQ ID NO: 2372 - DNA, 95 bp, Artificial Sequence
  Description of Artificial Sequence: Synthetic primer
aatgatacggcgaccaccgagatctacactatagcctacactctttccctacacgacgctcttccgatcttgctcagagaaggagtcatttgaag

SEQ ID NO: 2373 - DNA, 93 bp, Artificial Sequence
  Description of Artificial Sequence: Synthetic primer
aatgatacggcgaccaccgagatctacactatagcctacactctttccctacacgacgctcttccgatcttcccagacctggcctttttcttg

SEQ ID NO: 2374 - DNA, 90 bp, Artificial Sequence
  Description of Artificial Sequence: Synthetic primer
aatgatacggcgaccaccgagatctacactatagcctacactctttccctacacgacgctcttccgatctacggaacaaggtagccctgg

SEQ ID NO: 2375 - DNA, 90 bp, Artificial Sequence
  Description of Artificial Sequence: Synthetic primer
aatgatacggcgaccaccgagatctacactatagcctacactctttccctacacgacgctcttccgatctcccatcccttccctcatccc

SEQ ID NO: 2376 - DNA, 95 bp, Artificial Sequence
  Description of Artificial Sequence: Synthetic primer
aatgatacggcgaccaccgagatctacactatagcctacactctttccctacacgacgctcttccgatctaactcccacttctcgttgtaaggca

SEQ ID NO: 2377 - DNA, 91 bp, Artificial Sequence
  Description of Artificial Sequence: Synthetic primer
aatgatacggcgaccaccgagatctacactatagcctacactctttccctacacgacgctcttccgatctaatctggctcactcaggcacc

SEQ ID NO: 2378 - DNA, 88 bp, Artificial Sequence
  Description of Artificial Sequence: Synthetic primer
aatgatacggcgaccaccgagatctacactatagcctacactctttccctacacgacgctcttccgatctggtgcgaaggctccctct

SEQ ID NO: 2379 - DNA, 90 bp, Artificial Sequence
  Description of Artificial Sequence: Synthetic primer
aatgatacggcgaccaccgagatctacactatagcctacactctttccctacacgacgctcttccgatctaggaagaaaggaggaggccc

SEQ ID NO: 2380 - DNA, 94 bp, Artificial Sequence
  Description of Artificial Sequence: Synthetic primer
aatgatacggcgaccaccgagatctacactatagcctacactctttccctacacgacgctcttccgatctctgtgtagacgggagctgataagt

SEQ ID NO: 2381 - DNA, 91 bp, Artificial Sequence
  Description of Artificial Sequence: Synthetic primer
aatgatacggcgaccaccgagatctacactatagcctacactctttccctacacgacgctcttccgatctctaccgactgtccaccaccac

SEQ ID NO: 2382 - DNA, 89 bp, Artificial Sequence
  Description of Artificial Sequence: Synthetic primer
aatgatacggcgaccaccgagatctacactatagcctacactctttccctacacgacgctcttccgatctaacctggtgtgctgggagg

SEQ ID NO: 2383 - DNA, 90 bp, Artificial Sequence
  Description of Artificial Sequence: Synthetic primer
aatgatacggcgaccaccgagatctacactatagcctacactctttccctacacgacgctcttccgatctagtcaccacccatgtggccg

SEQ ID NO: 2384 - DNA, 90 bp, Artificial Sequence
  Description of Artificial Sequence: Synthetic primer
aatgatacggcgaccaccgagatctacactatagcctacactctttccctacacgacgctcttccgatctctgcttccagcaccgggtct

SEQ ID NO: 2385 - DNA, 91 bp, Artificial Sequence
  Description of Artificial Sequence: Synthetic primer
aatgatacggcgaccaccgagatctacactatagcctacactctttccctacacgacgctcttccgatctcctcttgggaggaggctcaga

SEQ ID NO: 2386 - DNA, 94 bp, Artificial Sequence
  Description of Artificial Sequence: Synthetic primer
aatgatacggcgaccaccgagatctacactatagcctacactctttccctacacgacgctcttccgatctcaaggactgaatcctttcacaggg

SEQ ID NO: 2387 - DNA, 95 bp, Artificial Sequence
  Description of Artificial Sequence: Synthetic primer
aatgatacggcgaccaccgagatctacactatagcctacactctttccctacacgacgctcttccgatctcaactgttttgaaaatccagcgtgg

SEQ ID NO: 2388 - DNA, 100 bp, Artificial Sequence
  Description of Artificial Sequence: Synthetic polynucleotide
aatgatacggcgaccaccgagatctacactatagcctacactctttccctacacgacgctcttccgatcttccaatctactaatgctaatactgtttcgt

SEQ ID NO: 2389 - DNA, 101 bp, Artificial Sequence
  Description of Artificial Sequence: Synthetic polynucleotide
aatgatacggcgaccaccgagatctacactatagcctacactctttccctacacgacgctcttccgatctaattaaccttttccagatattgatggacagt

SEQ ID NO: 2390 - DNA, 93 bp, Artificial Sequence
  Description of Artificial Sequence: Synthetic primer
aatgatacggcgaccaccgagatctacactatagcctacactctttccctacacgacgctcttccgatctcttccagacacgctatcatgcgt

SEQ ID NO: 2391 - DNA, 100 bp, Artificial Sequence; identical to SEQ ID NO: 2388
  Description of Artificial Sequence: Synthetic polynucleotide

SEQ ID NO: 2392 - DNA, 95 bp, Artificial Sequence
  Description of Artificial Sequence: Synthetic primer
aatgatacggcgaccaccgagatctacactatagcctacactctttccctacacgacgctcttccgatcttgatgctgctcatcccactaatgtc

SEQ ID NO: 2393 - DNA, 100 bp, Artificial Sequence
  Description of Artificial Sequence: Synthetic polynucleotide
aatgatacggcgaccaccgagatctacactatagcctacactctttccctacacgacgctcttccgatcttcagaatgcttgaagctaaaaagtagaaga

SEQ ID NO: 2394 - DNA, 99 bp, Artificial Sequence
  Description of Artificial Sequence: Synthetic primer
aatgatacggcgaccaccgagatctacactatagcctacactctttccctacacgacgctcttccgatcttagtttcagaatgtctacccaataccagt

SEQ ID NO: 2395 - DNA, 102 bp, Artificial Sequence
  Description of Artificial Sequence: Synthetic polynucleotide
aatgatacggcgaccaccgagatctacactatagcctacactctttccctacacgacgctcttccgatcttatgccattacaactctccacaaccttttatt

SEQ ID NO: 2396 - DNA, 95 bp, Artificial Sequence
  Description of Artificial Sequence: Synthetic primer
aatgatacggcgaccaccgagatctacactatagcctacactctttccctacacgacgctcttccgatctaggttggtaatatggctcttctcag

SEQ ID NO: 2397 - DNA, 105 bp, Artificial Sequence
  Description of Artificial Sequence: Synthetic polynucleotide
aatgatacggcgaccaccgagatctacactatagcctacactctttccctacacgacgctcttccgatctgctaatgactagggccttatatcctttttaatttt

SEQ ID NO: 2398 - DNA, 94 bp, Artificial Sequence
  Description of Artificial Sequence: Synthetic primer
aatgatacggcgaccaccgagatctacactatagcctacactctttccctacacgacgctcttccgatctgctggtgacagggaagacatcact

SEQ ID NO: 2399 - DNA, 105 bp, Artificial Sequence; identical to SEQ ID NO: 2397
  Description of Artificial Sequence: Synthetic polynucleotide

SEQ ID NO: 2400 - DNA, 94 bp, Artificial Sequence; identical to SEQ ID NO: 2398
  Description of Artificial Sequence: Synthetic primer

SEQ ID NO: 2401 - DNA, 95 bp, Artificial Sequence
  Description of Artificial Sequence: Synthetic primer
aatgatacggcgaccaccgagatctacactatagcctacactctttccctacacgacgctcttccgatctccagttcttccttctgtttttcagg

SEQ ID NO: 2402 - DNA, 96 bp, Artificial Sequence
  Description of Artificial Sequence: Synthetic primer
aatgatacggcgaccaccgagatctacactatagcctacactctttccctacacgacgctcttccgatctctttacagaggagaatgccctgtttg

SEQ ID NO: 2403 - DNA, 96 bp, Artificial Sequence
  Description of Artificial Sequence: Synthetic primer
aatgatacggcgaccaccgagatctacactatagcctacactctttccctacacgacgctcttccgatctggcttgccatgttttagctttagatt

SEQ ID NO: 2404 - DNA, 94 bp, Artificial Sequence
  Description of Artificial Sequence: Synthetic primer
aatgatacggcgaccaccgagatctacactatagcctacactctttccctacacgacgctcttccgatcttcaagggcctttttctccttgtct

SEQ ID NO: 2405 - DNA, 103 bp, Artificial Sequence
  Description of Artificial Sequence: Synthetic polynucleotide
aatgatacggcgaccaccgagatctacactatagcctacactctttccctacacgacgctcttccgatcttctattcttccttgctttgtgcatgtttatcta

SEQ ID NO: 2406 - DNA, 95 bp, Artificial Sequence
  Description of Artificial Sequence: Synthetic primer
aatgatacggcgaccaccgagatctacactatagcctacactctttccctacacgacgctcttccgatctttcttgcctattttgttgacaccct

SEQ ID NO: 2407 - DNA, 90 bp, Artificial Sequence
  Description of Artificial Sequence: Synthetic primer
aatgatacggcgaccaccgagatctacactatagcctacactctttccctacacgacgctcttccgatcttctggctagggagcaggctg

SEQ ID NO: 2408 - DNA, 92 bp, Artificial Sequence
  Description of Artificial Sequence: Synthetic primer
aatgatacggcgaccaccgagatctacactatagcctacactctttccctacacgacgctcttccgatctctgctgagaaaggcaggaaggc

SEQ ID NO: 2409 - DNA, 91 bp, Artificial Sequence
  Description of Artificial Sequence: Synthetic primer
aatgatacggcgaccaccgagatctacactatagcctacactctttccctacacgacgctcttccgatctccacctggcagtagccatgct

SEQ ID NO: 2410 - DNA, 91 bp, Artificial Sequence
  Description of Artificial Sequence: Synthetic primer
aatgatacggcgaccaccgagatctacactatagcctacactctttccctacacgacgctcttccgatctgcctgtacccttcctccctcg

SEQ ID NO: 2411 - DNA, 92 bp, Artificial Sequence
  Description of Artificial Sequence: Synthetic primer
aatgatacggcgaccaccgagatctacactatagcctacactctttccctacacgacgctcttccgatctctcaccttctccatctctgcca

SEQ ID NO: 2412 - DNA, 89 bp, Artificial Sequence
  Description of Artificial Sequence: Synthetic primer
aatgatacggcgaccaccgagatctacactatagcctacactctttccctacacgacgctcttccgatctctcggtctctcgctccgca

SEQ ID NO: 2413 - DNA, 89 bp, Artificial Sequence
  Description of Artificial Sequence: Synthetic primer
aatgatacggcgaccaccgagatctacactatagcctacactctttccctacacgacgctcttccgatctcccactgctccagcgactt

SEQ ID NO: 2414 - DNA, 92 bp, Artificial Sequence
  Description of Artificial Sequence: Synthetic primer
aatgatacggcgaccaccgagatctacactatagcctacactctttccctacacgacgctcttccgatcttcccacggaaatctgtctctgt

SEQ ID NO: 2415 - DNA, 89 bp, Artificial Sequence
  Description of Artificial Sequence: Synthetic primer
aatgatacggcgaccaccgagatctacactatagcctacactctttccctacacgacgctcttccgatctcctccaggacctcctccct

SEQ ID NO: 2416 - DNA, 98 bp, Artificial Sequence
  Description of Artificial Sequence: Synthetic primer
aatgatacggcgaccaccgagatctacactatagcctacactctttccctacacgacgctcttccgatcttctctttctgttttcttgcattattggt

SEQ ID NO: 2417 - DNA, 97 bp, Artificial Sequence
  Description of Artificial Sequence: Synthetic primer
aatgatacggcgaccaccgagatctacactatagcctacactctttccctacacgacgctcttccgatctaaaccatgtcctctcttttctctttgg

SEQ ID NO: 2418 - DNA, 93 bp, Artificial Sequence
  Description of Artificial Sequence: Synthetic primer
aatgatacggcgaccaccgagatctacactatagcctacactctttccctacacgacgctcttccgatcttggtttcatggttgctccctctc

SEQ ID NO: 2419 - DNA, 93 bp, Artificial Sequence
  Description of Artificial Sequence: Synthetic primer
aatgatacggcgaccaccgagatctacactatagcctacactctttccctacacgacgctcttccgatcttcaattacagtcgggatggcact

SEQ ID NO: 2420 - DNA, 96 bp, Artificial Sequence
  Description of Artificial Sequence: Synthetic primer
aatgatacggcgaccaccgagatctacactatagcctacactctttccctacacgacgctcttccgatctcacctcttcactcattctcttctctc

SEQ ID NO: 2421 - DNA, 90 bp, Artificial Sequence
  Description of Artificial Sequence: Synthetic primer
aatgatacggcgaccaccgagatctacactatagcctacactctttccctacacgacgctcttccgatctggcactcacttggctgtgtt

SEQ ID NO: 2422 - DNA, 90 bp, Artificial Sequence
  Description of Artificial Sequence: Synthetic primer
aatgatacggcgaccaccgagatctacactatagcctacactctttccctacacgacgctcttccgatcttcctcctcttctcctggcct

SEQ ID NO: 2423 - DNA, 95 bp, Artificial Sequence
  Description of Artificial Sequence: Synthetic primer
aatgatacggcgaccaccgagatctacactatagcctacactctttccctacacgacgctcttccgatcttcactcacatgcctctttctctacc

SEQ ID NO: 2424 - DNA, 99 bp, Artificial Sequence
  Description of Artificial Sequence: Synthetic primer
aatgatacggcgaccaccgagatctacactatagcctacactctttccctacacgacgctcttccgatctagtgtcaataccattttgcagatacctgg

SEQ ID NO: 2425 - DNA, 94 bp, Artificial Sequence
  Description of Artificial Sequence: Synthetic primer
aatgatacggcgaccaccgagatctacactatagcctacactctttccctacacgacgctcttccgatcttggctctgactcacccttgtttta

SEQ ID NO: 2426 - DNA, 104 bp, Artificial Sequence
  Description of Artificial Sequence: Synthetic polynucleotide
aatgatacggcgaccaccgagatctacactatagcctacactctttccctacacgacgctcttccgatctcttttacttgacctgtgagatgattgtattctct

SEQ ID NO: 2427 - DNA, 94 bp, Artificial Sequence
  Description of Artificial Sequence: Synthetic primer
aatgatacggcgaccaccgagatctacactatagcctacactctttccctacacgacgctcttccgatctccatctcttttgtgccaacatgcc

SEQ ID NO: 2428 - DNA, 90 bp, Artificial Sequence
  Description of Artificial Sequence: Synthetic primer
aatgatacggcgaccaccgagatctacactatagcctacactctttccctacacgacgctcttccgatctacactccacggaatgagggc

SEQ ID NO: 2429 - DNA, 101 bp, Artificial Sequence
  Description of Artificial Sequence: Synthetic polynucleotide
aatgatacggcgaccaccgagatctacactatagcctacactctttccctacacgacgctcttccgatctgagaaatgatgatgctgagactagatgactt

SEQ ID NO: 2430 - DNA, 102 bp, Artificial Sequence
  Description of Artificial Sequence: Synthetic polynucleotide
aatgatacggcgaccaccgagatctacactatagcctacactctttccctacacgacgctcttccgatctaacttctgagtttatctatgtctgtatcctcc

SEQ ID NO: 2431 - DNA, 102 bp, Artificial Sequence
  Description of Artificial Sequence: Synthetic polynucleotide
aatgatacggcgaccaccgagatctacactatagcctacactctttccctacacgacgctcttccgatctctatttcctcagttacaccaatctgaagttta

SEQ ID NO: 2432 - DNA, 99 bp, Artificial Sequence
  Description of Artificial Sequence: Synthetic primer
aatgatacggcgaccaccgagatctacactatagcctacactctttccctacacgacgctcttccgatcttgcacaggttattctgatttcccattctt

SEQ ID NO: 2433 - DNA, 102 bp, Artificial Sequence
  Description of Artificial Sequence: Synthetic polynucleotide
aatgatacggcgaccaccgagatctacactatagcctacactctttccctacacgacgctcttccgatctctctcttttgttttcctttatttttgttccca

SEQ ID NO: 2434 - DNA, 98 bp, Artificial Sequence
  Description of Artificial Sequence: Synthetic primer
aatgatacggcgaccaccgagatctacactatagcctacactctttccctacacgacgctcttccgatctgtttgtttgtttaactttgtgtcgctac

SEQ ID NO: 2435 - DNA, 89 bp, Artificial Sequence
  Description of Artificial Sequence: Synthetic primer
aatgatacggcgaccaccgagatctacactatagcctacactctttccctacacgacgctcttccgatctcagatgccagcacaacccg

SEQ ID NO: 2436 - DNA, 92 bp, Artificial Sequence
  Description of Artificial Sequence: Synthetic primer
aatgatacggcgaccaccgagatctacactatagcctacactctttccctacacgacgctcttccgatctcatcctgcccttccttctccct

SEQ ID NO: 2437 - DNA, 90 bp, Artificial Sequence
  Description of Artificial Sequence: Synthetic primer
aatgatacggcgaccaccgagatctacactatagcctacactctttccctacacgacgctcttccgatctaggcccaggagctttcacca

SEQ ID NO: 2438 - DNA, 93 bp, Artificial Sequence
  Description of Artificial Sequence: Synthetic primer
aatgatacggcgaccaccgagatctacactatagcctacactctttccctacacgacgctcttccgatcttagaagccattagtgagctggcc

SEQ ID NO: 2439 - DNA, 95 bp, Artificial Sequence
  Description of Artificial Sequence: Synthetic primer
aatgatacggcgaccaccgagatctacactatagcctacactctttccctacacgacgctcttccgatctagggcagaaatatccaaggaggaag

SEQ ID NO: 2440 - DNA, 90 bp, Artificial Sequence
  Description of Artificial Sequence: Synthetic primer
aatgatacggcgaccaccgagatctacactatagcctacactctttccctacacgacgctcttccgatctccaggtgctgagtgtgcagg

SEQ ID NO: 2441 - DNA, 88 bp, Artificial Sequence
  Description of Artificial Sequence: Synthetic primer
aatgatacggcgaccaccgagatctacactatagcctacactctttccctacacgacgctcttccgatctacaaggcggccagcacct

SEQ ID NO: 2442 - DNA, 91 bp, Artificial Sequence
  Description of Artificial Sequence: Synthetic primer
aatgatacggcgaccaccgagatctacactatagcctacactctttccctacacgacgctcttccgatctatggaaagaccgggtctggag

SEQ ID NO: 2443 - DNA, 88 bp, Artificial Sequence
  Description of Artificial Sequence: Synthetic primer
aatgatacggcgaccaccgagatctacactatagcctacactctttccctacacgacgctcttccgatctggctcagccaagggagct

SEQ ID NO: 2444 - DNA, 92 bp, Artificial Sequence
  Description of Artificial Sequence: Synthetic primer
aatgatacggcgaccaccgagatctacactatagcctacactctttccctacacgacgctcttccgatctggcccagctaaggagaccactg

SEQ ID NO: 2445 - DNA, 88 bp, Artificial Sequence
  Description of Artificial Sequence: Synthetic primer
aatgatacggcgaccaccgagatctacactatagcctacactctttccctacacgacgctcttccgatctacggcacctctcctgggt

SEQ ID NO: 2446 - DNA, 93 bp, Artificial Sequence
  Description of Artificial Sequence: Synthetic primer
aatgatacggcgaccaccgagatctacactatagcctacactctttccctacacgacgctcttccgatctcactaggagtgccagagttccca

SEQ ID NO: 2447 - DNA, 91 bp, Artificial Sequence
  Description of Artificial Sequence: Synthetic primer
aatgatacggcgaccaccgagatctacactatagcctacactctttccctacacgacgctcttccgatctggcttctccgctgtgctcttc

SEQ ID NO: 2448 - DNA, 89 bp, Artificial Sequence
  Description of Artificial Sequence: Synthetic primer
aatgatacggcgaccaccgagatctacactatagcctacactctttccctacacgacgctcttccgatctccctggtgtggatctgcct

SEQ ID NO: 2449 - DNA, 90 bp, Artificial Sequence
  Description of Artificial Sequence: Synthetic primer
aatgatacggcgaccaccgagatctacactatagcctacactctttccctacacgacgctcttccgatctctgcactccaacttccaggc

SEQ ID NO: 2450 - DNA, 90 bp, Artificial Sequence
  Description of Artificial Sequence: Synthetic primer
aatgatacggcgaccaccgagatctacactatagcctacactctttccctacacgacgctcttccgatctcccaggctactgccaaaccc

SEQ ID NO: 2451 - DNA, 90 bp, Artificial Sequence
  Description of Artificial Sequence: Synthetic primer
aatgatacggcgaccaccgagatctacactatagcctacactctttccctacacgacgctcttccgatctgctcgtcatcgcctgctttg

SEQ ID NO: 2452 - DNA, 94 bp, Artificial Sequence
  Description of Artificial Sequence: Synthetic primer
aatgatacggcgaccaccgagatctacactatagcctacactctttccctacacgacgctcttccgatctcagttattctcccattgcacagcc

SEQ ID NO: 2453 - DNA, 90 bp, Artificial Sequence
  Description of Artificial Sequence: Synthetic primer
aatgatacggcgaccaccgagatctacactatagcctacactctttccctacacgacgctcttccgatctgggctccgtccaggaaccta

SEQ ID NO: 2454 - DNA, 96 bp, Artificial Sequence
  Description of Artificial Sequence: Synthetic primer
aatgatacggcgaccaccgagatctacactatagcctacactctttccctacacgacgctcttccgatcttcacttctggttttccagttctgcag

SEQ ID NO: 2455 - DNA, 92 bp, Artificial Sequence
  Description of Artificial Sequence: Synthetic primer
aatgatacggcgaccaccgagatctacactatagcctacactctttccctacacgacgctcttccgatctccacccgtgtccttcttctaga

SEQ ID NO: 2456 - DNA, 90 bp, Artificial Sequence
  Description of Artificial Sequence: Synthetic primer
aatgatacggcgaccaccgagatctacactatagcctacactctttccctacacgacgctcttccgatcttccttcctgggacctgctgg

SEQ ID NO: 2457 - DNA, 92 bp, Artificial Sequence
  Description of Artificial Sequence: Synthetic primer
aatgatacggcgaccaccgagatctacactatagcctacactctttccctacacgacgctcttccgatcttcactccgcttctccaagtccc

SEQ ID NO: 2458 - DNA, 94 bp, Artificial Sequence
  Description of Artificial Sequence: Synthetic primer
aatgatacggcgaccaccgagatctacactatagcctacactctttccctacacgacgctcttccgatctcacaggagggtgtgtaggatgtga

SEQ ID NO: 2459 - DNA, 90 bp, Artificial Sequence
  Description of Artificial Sequence: Synthetic primer
aatgatacggcgaccaccgagatctacactatagcctacactctttccctacacgacgctcttccgatctctctccctctcccaggccag

SEQ ID NO: 2460 - DNA, 97 bp, Artificial Sequence
  Description of Artificial Sequence: Synthetic primer
aatgatacggcgaccaccgagatctacactatagcctacactctttccctacacgacgctcttccgatctagttcacagcaactgtttcacaaatca

SEQ ID NO: 2461 - DNA, 99 bp, Artificial Sequence
  Description of Artificial Sequence: Synthetic primer
aatgatacggcgaccaccgagatctacactatagcctacactctttccctacacgacgctcttccgatcttcatagcattctaattccagcaggattct

SEQ ID NO: 2462 - DNA, 98 bp, Artificial Sequence
  Description of Artificial Sequence: Synthetic primer
aatgatacggcgaccaccgagatctacactatagcctacactctttccctacacgacgctcttccgatctatgcttgccagtgttctaaaaagtataa

SEQ ID NO: 2463 - DNA, 103 bp, Artificial Sequence
  Description of Artificial Sequence: Synthetic polynucleotide
aatgatacggcgaccaccgagatctacactatagcctacactctttccctacacgacgctcttccgatctgctacattttgttctttcagtctaatcttgttt

SEQ ID NO: 2464 - DNA, 99 bp, Artificial Sequence
  Description of Artificial Sequence: Synthetic primer
aatgatacggcgaccaccgagatctacactatagcctacactctttccctacacgacgctcttccgatctaatagaaaccaaggctgagttctcaagaa

SEQ ID NO: 2465 - DNA, 100 bp, Artificial Sequence
  Description of Artificial Sequence: Synthetic polynucleotide
aatgatacggcgaccaccgagatctacactatagcctacactctttccctacacgacgctcttccgatctataacttacattgcatttgtgagatggaga

SEQ ID NO: 2466 - DNA, 91 bp, Artificial Sequence
  Description of Artificial Sequence: Synthetic primer
aatgatacggcgaccaccgagatctacactatagcctacactctttccctacacgacgctcttccgatcttgcaagaagtgggcaacacct

SEQ ID NO: 2467 - DNA, 93 bp, Artificial Sequence
  Description of Artificial Sequence: Synthetic primer
aatgatacggcgaccaccgagatctacactatagcctacactctttccctacacgacgctcttccgatctacaatagcgggcaactgattcaa

SEQ ID NO: 2468 - DNA, 94 bp, Artificial Sequence
  Description of Artificial Sequence: Synthetic primer
aatgatacggcgaccaccgagatctacactatagcctacactctttccctacacgacgctcttccgatcttcacactgacatacttagtggcag

SEQ ID NO: 2469 - DNA, 99 bp, Artificial Sequence
  Description of Artificial Sequence: Synthetic primer
aatgatacggcgaccaccgagatctacactatagcctacactctttccctacacgacgctcttccgatctctgtattatttctcatggcagctctttat

SEQ ID NO: 2470 - DNA, 97 bp, Artificial Sequence
  Description of Artificial Sequence: Synthetic primer
aatgatacggcgaccaccgagatctacactatagcctacactctttccctacacgacgctcttccgatctaccaacttatgccaattctcttgtttt

SEQ ID NO: 2471 - DNA, 100 bp, Artificial Sequence
  Description of Artificial Sequence: Synthetic polynucleotide
aatgatacggcgaccaccgagatctacactatagcctacactctttccctacacgacgctcttccgatcttgtgtaatgataggtcttgtcaaatagttt

SEQ ID NO: 2472 - DNA, 95 bp, Artificial Sequence
  Description of Artificial Sequence: Synthetic primer
aatgatacggcgaccaccgagatctacactatagcctacactctttccctacacgacgctcttccgatctaaacttcaatccggccatttctaca

SEQ ID NO: 2473 - DNA, 100 bp, Artificial Sequence
  Description of Artificial Sequence: Synthetic polynucleotide
aatgatacggcgaccaccgagatctacactatagcctacactctttccctacacgacgctcttccgatctgaattaagtggaaatgatggcaaatgccta

SEQ ID NO: 2474 - DNA, 98 bp, Artificial Sequence
  Description of Artificial Sequence: Synthetic primer
aatgatacggcgaccaccgagatctacactatagcctacactctttccctacacgacgctcttccgatctatagggctcaaggcttcttttactgaaa

SEQ ID NO: 2475 - DNA, 95 bp, Artificial Sequence
  Description of Artificial Sequence: Synthetic primer
aatgatacggcgaccaccgagatctacactatagcctacactctttccctacacgacgctcttccgatctttgcatcacacatttcagctcccag

SEQ ID NO: 2476 - DNA, 103 bp, Artificial Sequence
  Description of Artificial Sequence: Synthetic polynucleotide
aatgatacggcgaccaccgagatctacactatagcctacactctttccctacacgacgctcttccgatctaatctgttggagtacaactccatattttctgat

SEQ ID NO: 2477 - DNA, 100 bp, Artificial Sequence
  Description of Artificial Sequence: Synthetic polynucleotide
aatgatacggcgaccaccgagatctacactatagcctacactctttccctacacgacgctcttccgatctagcatactcactattaagcataaaagacaa

SEQ ID NO: 2478 - DNA, 98 bp, Artificial Sequence
  Description of Artificial Sequence: Synthetic primer
aatgatacggcgaccaccgagatctacactatagcctacactctttccctacacgacgctcttccgatctgcagtcattcttctggatattgctagga

SEQ ID NO: 2479 - DNA, 103 bp, Artificial Sequence
  Description of Artificial Sequence: Synthetic polynucleotide
aatgatacggcgaccaccgagatctacactatagcctacactctttccctacacgacgctcttccgatctgagcagtacacagataggtgtttttttcattta

SEQ ID NO: 2480 - DNA, 98 bp, Artificial Sequence
  Description of Artificial Sequence: Synthetic primer
aatgatacggcgaccaccgagatctacactatagcctacactctttccctacacgacgctcttccgatctttgctccatcatttctgacactataaac

SEQ ID NO: 2481 - DNA, 95 bp, Artificial Sequence
  Description of Artificial Sequence: Synthetic primer
aatgatacggcgaccaccgagatctacactatagcctacactctttccctacacgacgctcttccgatctgcttgttgactccaaataggagacg

SEQ ID NO: 2482 - DNA, 98 bp, Artificial Sequence
  Description of Artificial Sequence: Synthetic primer
aatgatacggcgaccaccgagatctacactatagcctacactctttccctacacgacgctcttccgatctttaagatatttgtgcatggtgatggtag

SEQ ID NO: 2483 - DNA, 103 bp, Artificial Sequence
  Description of Artificial Sequence: Synthetic polynucleotide
aatgatacggcgaccaccgagatctacactatagcctacactctttccctacacgacgctcttccgatctcaagatcaaatactgttattttcatttgcagag

SEQ ID NO: 2484 - DNA, 97 bp, Artificial Sequence
  Description of Artificial Sequence: Synthetic primer
aatgatacggcgaccaccgagatctacactatagcctacactctttccctacacgacgctcttccgatctttctttaccacatctgtgactgttgct

SEQ ID NO: 2485 - DNA, 102 bp, Artificial Sequence
  Description of Artificial Sequence: Synthetic polynucleotide
aatgatacggcgaccaccgagatctacactatagcctacactctttccctacacgacgctcttccgatctttcagcatgaaatagtgtatcagtggtactta

SEQ ID NO: 2486 - DNA, 90 bp, Artificial Sequence
  Description of Artificial Sequence: Synthetic primer
aatgatacggcgaccaccgagatctacactatagcctacactctttccctacacgacgctcttccgatctcctacccgcagagcactccc

SEQ ID NO: 2487 - DNA, 93 bp, Artificial Sequence
  Description of Artificial Sequence: Synthetic primer
aatgatacggcgaccaccgagatctacactatagcctacactctttccctacacgacgctcttccgatctccagtattgatcgggagagccgg

SEQ ID NO: 2488 - DNA, 100 bp, Artificial Sequence
  Description of Artificial Sequence: Synthetic polynucleotide
aatgatacggcgaccaccgagatctacactatagcctacactctttccctacacgacgctcttccgatctagtttttctgcatttctcagtatttcatgt

SEQ ID NO: 2489 - DNA, 98 bp, Artificial Sequence
  Description of Artificial Sequence: Synthetic primer
aatgatacggcgaccaccgagatctacactatagcctacactctttccctacacgacgctcttccgatcttcttgagttcctcaaaagagaaatcacg

SEQ ID NO: 2490 - DNA, 91 bp, Artificial Sequence
  Description of Artificial Sequence: Synthetic primer
aatgatacggcgaccaccgagatctacactatagcctacactctttccctacacgacgctcttccgatctggaaagagtgctcaccgcagt

SEQ ID NO: 2491 - DNA, 96 bp, Artificial Sequence
  Description of Artificial Sequence: Synthetic primer
aatgatacggcgaccaccgagatctacactatagcctacactctttccctacacgacgctcttccgatctgcgtcatcagtttctcatcatttcac

SEQ ID NO: 2492 - DNA, 95 bp, Artificial Sequence
  Description of Artificial Sequence: Synthetic primer
aatgatacggcgaccaccgagatctacactatagcctacactctttccctacacgacgctcttccgatctctcttcagctcacagggaacctttg

SEQ ID NO: 2493 - DNA, 91 bp, Artificial Sequence
  Description of Artificial Sequence: Synthetic primer
aatgatacggcgaccaccgagatctacactatagcctacactctttccctacacgacgctcttccgatctctcacttgcccagcgtgtcct

SEQ ID NO: 2494 - DNA, 97 bp, Artificial Sequence
  Description of Artificial Sequence: Synthetic primer
aatgatacggcgaccaccgagatctacactatagcctacactctttccctacacgacgctcttccgatctgtcatcaccttcctttcatgctctctt

SEQ ID NO: 2495 - DNA, 98 bp, Artificial Sequence
  Description of Artificial Sequence: Synthetic primer
aatgatacggcgaccaccgagatctacactatagcctacactctttccctacacgacgctcttccgatctacggaatacacgtctctcttatctctgc

SEQ ID NO: 2496 - DNA, 99 bp, Artificial Sequence
  Description of Artificial Sequence: Synthetic primer
aatgatacggcgaccaccgagatctacactatagcctacactctttccctacacgacgctcttccgatctataatcaccctgttgtttgtttcagtgac

SEQ ID NO: 2497 - DNA, 92 bp, Artificial Sequence
  Description of Artificial Sequence: Synthetic primer
aatgatacggcgaccaccgagatctacactatagcctacactctttccctacacgacgctcttccgatctactcctacgtggtgtgtgtctg

SEQ ID NO: 2498 - DNA, 103 bp, Artificial Sequence
  Description of Artificial Sequence: Synthetic polynucleotide
aatgatacggcgaccaccgagatctacactatagcctacactctttccctacacgacgctcttccgatctataatttttcaccacatgatttttcttctctcc

SEQ ID NO: 2499 - DNA, 91 bp, Artificial Sequence
  Description of Artificial Sequence: Synthetic primer
aatgatacggcgaccaccgagatctacactatagcctacactctttccctacacgacgctcttccgatcttgactgctgtgacccactctg

SEQ ID NO: 2500 - DNA, 92 bp, Artificial Sequence
  Description of Artificial Sequence: Synthetic primer
aatgatacggcgaccaccgagatctacactatagcctacactctttccctacacgacgctcttccgatctgacgggtttcctcttcctcctc

SEQ ID NO: 2501 - DNA, 96 bp, Artificial Sequence
  Description of Artificial Sequence: Synthetic primer
aatgatacggcgaccaccgagatctacactatagcctacactctttccctacacgacgctcttccgatcttgcatgaacatttttctccaccttgg

SEQ ID NO: 2502 - DNA, 100 bp, Artificial Sequence
  Description of Artificial Sequence: Synthetic polynucleotide
aatgatacggcgaccaccgagatctacactatagcctacactctttccctacacgacgctcttccgatcttgttagtggtcatttttctaatgtctttct

SEQ ID NO: 2503 - DNA, 95 bp, Artificial Sequence
  Description of Artificial Sequence: Synthetic primer
aatgatacggcgaccaccgagatctacactatagcctacactctttccctacacgacgctcttccgatctattatagtgttacaccagggctccc

SEQ ID NO: 2504 - DNA, 93 bp, Artificial Sequence
  Description of Artificial Sequence: Synthetic primer
aatgatacggcgaccaccgagatctacactatagcctacactctttccctacacgacgctcttccgatcttcccttctcttctgccgtcagag

SEQ ID NO: 2505 - DNA, 98 bp, Artificial Sequence
  Description of Artificial Sequence: Synthetic primer
aatgatacggcgaccaccgagatctacactatagcctacactctttccctacacgacgctcttccgatcttgccaaagaagtagaatgagaaaaatgt

SEQ ID NO: 2506 - DNA, 92 bp, Artificial Sequence
  Description of Artificial Sequence: Synthetic primer
aatgatacggcgaccaccgagatctacactatagcctacactctttccctacacgacgctcttccgatctccttgttcctccacctcattcc

SEQ ID NO: 2507 - DNA, 91 bp, Artificial Sequence
  Description of Artificial Sequence: Synthetic primer
aatgatacggcgaccaccgagatctacactatagcctacactctttccctacacgacgctcttccgatctaggtgacccttgtctctgtgt

SEQ ID NO: 2508 - DNA, 93 bp, Artificial Sequence
  Description of Artificial Sequence: Synthetic primer
aatgatacggcgaccaccgagatctacactatagcctacactctttccctacacgacgctcttccgatctcagcatgtggcaccatctcacaa

SEQ ID NO: 2509 - DNA, 90 bp, Artificial Sequence
  Description of Artificial Sequence: Synthetic primer
aatgatacggcgaccaccgagatctacactatagcctacactctttccctacacgacgctcttccgatctgcgaagccacactgacgtgc

SEQ ID NO: 2510 - DNA, 95 bp, Artificial Sequence
  Description of Artificial Sequence: Synthetic primer
aatgatacggcgaccaccgagatctacactatagcctacactctttccctacacgacgctcttccgatctagcttcttcccatgatgatctgtcc

SEQ ID NO: 2511 - DNA, 99 bp, Artificial Sequence
  Description of Artificial Sequence: Synthetic primer
aatgatacggcgaccaccgagatctacactatagcctacactctttccctacacgacgctcttccgatctggaaactaatagttgtctcactgcctcat

SEQ ID NO: 2512 - DNA, 97 bp, Artificial Sequence
  Description of Artificial Sequence: Synthetic primer
aatgatacggcgaccaccgagatctacactatagcctacactctttccctacacgacgctcttccgatctctgccttcttttcttgcttcatcctct

SEQ ID NO: 2513 - DNA, 100 bp, Artificial Sequence
  Description of Artificial Sequence: Synthetic polynucleotide
aatgatacggcgaccaccgagatctacactatagcctacactctttccctacacgacgctcttccgatctgtgttctaattgcactgttttttctcattc

SEQ ID NO: 2514 - DNA, 97 bp, Artificial Sequence
  Description of Artificial Sequence: Synthetic primer
aatgatacggcgaccaccgagatctacactatagcctacactctttccctacacgacgctcttccgatctacgggccattctaatagcctcaaaatc

SEQ ID NO: 2515 - DNA, 97 bp, Artificial Sequence
  Description of Artificial Sequence: Synthetic primer
aatgatacggcgaccaccgagatctacactatagcctacactctttccctacacgacgctcttccgatctaagtggatgagatgtggtacaagcatt

SEQ ID NO: 2516 - DNA, 95 bp, Artificial Sequence
  Description of Artificial Sequence: Synthetic primer
aatgatacggcgaccaccgagatctacactatagcctacactctttccctacacgacgctcttccgatctcggagtaaccttccctcatttcctc

SEQ ID NO: 2517 - DNA, 94 bp, Artificial Sequence
  Description of Artificial Sequence: Synthetic primer
aatgatacggcgaccaccgagatctacactatagcctacactctttccctacacgacgctcttccgatcttgctttgctgattacttcacctct

SEQ ID NO: 2518 - DNA, 92 bp, Artificial Sequence
  Description of Artificial Sequence: Synthetic primer
aatgatacggcgaccaccgagatctacactatagcctacactctttccctacacgacgctcttccgatcttggacaaccctgactaccagca

SEQ ID NO: 2519 - DNA, 90 bp, Artificial Sequence
  Description of Artificial Sequence: Synthetic primer
aatgatacggcgaccaccgagatctacactatagcctacactctttccctacacgacgctcttccgatctcccttcaccctctgcggagt

SEQ ID NO: 2520 - DNA, 94 bp, Artificial Sequence
  Description of Artificial Sequence: Synthetic primer
aatgatacggcgaccaccgagatctacactatagcctacactctttccctacacgacgctcttccgatctagccactcttccctctgctttgaa

SEQ ID NO: 2521 - DNA, 95 bp, Artificial Sequence
  Description of Artificial Sequence: Synthetic primer
aatgatacggcgaccaccgagatctacactatagcctacactctttccctacacgacgctcttccgatctttgccctgttgtctctctcatttac

SEQ ID NO: 2522 - DNA, 91 bp, Artificial Sequence
  Description of Artificial Sequence: Synthetic primer
aatgatacggcgaccaccgagatctacactatagcctacactctttccctacacgacgctcttccgatctccggtcagttcccgatggttc

SEQ ID NO: 2523 - DNA, 95 bp, Artificial Sequence
  Description of Artificial Sequence: Synthetic primer
aatgatacggcgaccaccgagatctacactatagcctacactctttccctacacgacgctcttccgatctccctgtcacttctttccctacctca

SEQ ID NO: 2524 - DNA, 94 bp, Artificial Sequence
  Description of Artificial Sequence: Synthetic primer
aatgatacggcgaccaccgagatctacactatagcctacactctttccctacacgacgctcttccgatctccttgtgttgccttccttcccaac

SEQ ID NO: 2525 - DNA, 92 bp, Artificial Sequence
  Description of Artificial Sequence: Synthetic primer
aatgatacggcgaccaccgagatctacactatagcctacactctttccctacacgacgctcttccgatcttgaccaagaccatctgtgctcc

SEQ ID NO: 2526 - DNA, 94 bp, Artificial Sequence; identical to SEQ ID NO: 2524
  Description of Artificial Sequence: Synthetic primer

SEQ ID NO: 2527 - DNA, 100 bp, Artificial Sequence
  Description of Artificial Sequence: Synthetic polynucleotide
aatgatacggcgaccaccgagatctacactatagcctacactctttccctacacgacgctcttccgatctacgtaacataaatctgatgagcctcctttt

SEQ ID NO: 2528 - DNA, 95 bp, Artificial Sequence
  Description of Artificial Sequence: Synthetic primer
aatgatacggcgaccaccgagatctacactatagcctacactctttccctacacgacgctcttccgatctcctaacagccatgctttctctcctt

SEQ ID NO: 2529 - DNA, 94 bp, Artificial Sequence
  Description of Artificial Sequence: Synthetic primer
aatgatacggcgaccaccgagatctacactatagcctacactctttccctacacgacgctcttccgatctaatgacagtggagcctgtgtacct

SEQ ID NO: 2530 - DNA, 90 bp, Artificial Sequence
  Description of Artificial Sequence: Synthetic primer
aatgatacggcgaccaccgagatctacactatagcctacactctttccctacacgacgctcttccgatctggtgtcctcctcctcttccc

SEQ ID NO: 2531 - DNA, 90 bp, Artificial Sequence
  Description of Artificial Sequence: Synthetic primer
aatgatacggcgaccaccgagatctacactatagcctacactctttccctacacgacgctcttccgatctgtgagggaacaggctctggg

SEQ ID NO: 2532 - DNA, 92 bp, Artificial Sequence
  Description of Artificial Sequence: Synthetic primer
aatgatacggcgaccaccgagatctacactatagcctacactctttccctacacgacgctcttccgatctctgaggctgggtgtgctcattg

SEQ ID NO: 2533 - DNA, 94 bp, Artificial Sequence
  Description of Artificial Sequence: Synthetic primer
aatgatacggcgaccaccgagatctacactatagcctacactctttccctacacgacgctcttccgatctaagaagaaggctccctgcccatat

SEQ ID NO: 2534 - DNA, 92 bp, Artificial Sequence; identical to SEQ ID NO: 2532
  Description of Artificial Sequence: Synthetic primer

SEQ ID NO: 2535 - DNA, 97 bp, Artificial Sequence
  Description of Artificial Sequence: Synthetic primer
aatgatacggcgaccaccgagatctacactatagcctacactctttccctacacgacgctcttccgatctgggtttcagagtttcacgaggaaaagg

SEQ ID NO: 2536 - DNA, 91 bp, Artificial Sequence
  Description of Artificial Sequence: Synthetic primer
aatgatacggcgaccaccgagatctacactatagcctacactctttccctacacgacgctcttccgatctagtggcagagggcaaagtgtg

SEQ ID NO: 2537 - DNA, 93 bp, Artificial Sequence
  Description of Artificial Sequence: Synthetic primer
aatgatacggcgaccaccgagatctacactatagcctacactctttccctacacgacgctcttccgatctccagataatgctagggcctgcag

SEQ ID NO: 2538 - DNA, 91 bp, Artificial Sequence
  Description of Artificial Sequence: Synthetic primer
aatgatacggcgaccaccgagatctacactatagcctacactctttccctacacgacgctcttccgatctagaaggctccctgcccatatg

SEQ ID NO: 2539 - DNA, 94 bp, Artificial Sequence
  Description of Artificial Sequence: Synthetic primer
aatgatacggcgaccaccgagatctacactatagcctacactctttccctacacgacgctcttccgatctgaatgtcacatctctgggcttccg

SEQ ID NO: 2540 - DNA, 96 bp, Artificial Sequence
  Description of Artificial Sequence: Synthetic primer
aatgatacggcgaccaccgagatctacactatagcctacactctttccctacacgacgctcttccgatctcccactgcaactttctgaatgggtac

SEQ ID NO: 2541 - DNA, 94 bp, Artificial Sequence
  Description of Artificial Sequence: Synthetic primer
aatgatacggcgaccaccgagatctacactatagcctacactctttccctacacgacgctcttccgatctggaggtatggaattgaccttggga

SEQ ID NO: 2542 - DNA, 91 bp, Artificial Sequence
  Description of Artificial Sequence: Synthetic primer
aatgatacggcgaccaccgagatctacactatagcctacactctttccctacacgacgctcttccgatctgactcctctcctaacccaccc

SEQ ID NO: 2543 - DNA, 93 bp, Artificial Sequence; identical to SEQ ID NO: 2537
  Description of Artificial Sequence: Synthetic primer

SEQ ID NO: 2544 - DNA, 94 bp, Artificial Sequence
  Description of Artificial Sequence: Synthetic primer
aatgatacggcgaccaccgagatctacactatagcctacactctttccctacacgacgctcttccgatctaaggtcaggacttggaagtgaccc

SEQ ID NO: 2545 - DNA, 95 bp, Artificial Sequence
  Description of Artificial Sequence: Synthetic primer
aatgatacggcgaccaccgagatctacactatagcctacactctttccctacacgacgctcttccgatctaccttgggatctgattcttcctgac

SEQ ID NO: 2546 - DNA, 95 bp, Artificial Sequence
  Description of Artificial Sequence: Synthetic primer
aatgatacggcgaccaccgagatctacactatagcctacactctttccctacacgacgctcttccgatctgtccaagctctcatttaaggtggtg

SEQ ID NO: 2547 - DNA, 95 bp, Artificial Sequence
  Description of Artificial Sequence: Synthetic primer
aatgatacggcgaccaccgagatctacactatagcctacactctttccctacacgacgctcttccgatctaagatgcaaacccaggataatgttg

SEQ ID NO: 2548 - DNA, 97 bp, Artificial Sequence
  Description of Artificial Sequence: Synthetic primer
aatgatacggcgaccaccgagatctacactatagcctacactctttccctacacgacgctcttccgatctgaatggcctttcctgagtaactccttc

SEQ ID NO: 2549 - DNA, 98 bp, Artificial Sequence
  Description of Artificial Sequence: Synthetic primer
aatgatacggcgaccaccgagatctacactatagcctacactctttccctacacgacgctcttccgatctgtgtatgtgaacctgttggtttcctaga

SEQ ID NO: 2550 - DNA, 95 bp, Artificial Sequence
  Description of Artificial Sequence: Synthetic primer
aatgatacggcgaccaccgagatctacactatagcctacactctttccctacacgacgctcttccgatctgggagaatgaccttatgccaactcc

SEQ ID NO: 2551 - DNA, 90 bp, Artificial Sequence
  Description of Artificial Sequence: Synthetic primer
aatgatacggcgaccaccgagatctacactatagcctacactctttccctacacgacgctcttccgatctcattggcagcctggaccatg

SEQ ID NO: 2552 - DNA, 93 bp, Artificial Sequence
  Description of Artificial Sequence: Synthetic primer
aatgatacggcgaccaccgagatctacactatagcctacactctttccctacacgacgctcttccgatctgtccctggtgccaaaaaaggttg

SEQ ID NO: 2553 - DNA, 102 bp, Artificial Sequence
  Description of Artificial Sequence: Synthetic polynucleotide
aatgatacggcgaccaccgagatctacactatagcctacactctttccctacacgacgctcttccgatcttaaacttgtgatacctctatctttaatccgca

SEQ ID NO: 2554 - DNA, 94 bp, Artificial Sequence
  Description of Artificial Sequence: Synthetic primer
aatgatacggcgaccaccgagatctacactatagcctacactctttccctacacgacgctcttccgatctcaggtgtgacagtttgggagttga

SEQ ID NO: 2555 - DNA, 100 bp, Artificial Sequence
  Description of Artificial Sequence: Synthetic polynucleotide
aatgatacggcgaccaccgagatctacactatagcctacactctttccctacacgacgctcttccgatctctcttttatgtctctacctcctacatctta

SEQ ID NO: 2556 - DNA, 92 bp, Artificial Sequence
  Description of Artificial Sequence: Synthetic primer
aatgatacggcgaccaccgagatctacactatagcctacactctttccctacacgacgctcttccgatctctgagccctcacaaaccctaca

SEQ ID NO: 2557 - DNA, 92 bp, Artificial Sequence
  Description of Artificial Sequence: Synthetic primer
aatgatacggcgaccaccgagatctacactatagcctacactctttccctacacgacgctcttccgatctggagttggctggaaccaggatt

SEQ ID NO: 2558 - DNA, 105 bp, Artificial Sequence
  Description of Artificial Sequence: Synthetic polynucleotide
aatgatacggcgaccaccgagatctacactatagcctacactctttccctacacgacgctcttccgatctctcccttcatcttaaccttttccttattttttcat

SEQ ID NO: 2559 - DNA, 100 bp, Artificial Sequence
  Description of Artificial Sequence: Synthetic polynucleotide
aatgatacggcgaccaccgagatctacactatagcctacactctttccctacacgacgctcttccgatctaatctctcttctttcctcatcatgtaaatt

SEQ ID NO: 2560 - DNA, 96 bp, Artificial Sequence
  Description of Artificial Sequence: Synthetic primer
aatgatacggcgaccaccgagatctacactatagcctacactctttccctacacgacgctcttccgatctgggctcctcttttttcttctctgatc

SEQ ID NO: 2561 - DNA, 93 bp, Artificial Sequence
  Description of Artificial Sequence: Synthetic primer
aatgatacggcgaccaccgagatctacactatagcctacactctttccctacacgacgctcttccgatctgcatctgagcaagggtatgaaga

SEQ ID NO: 2562 - DNA, 92 bp, Artificial Sequence
  Description of Artificial Sequence: Synthetic primer
aatgatacggcgaccaccgagatctacactatagcctacactctttccctacacgacgctcttccgatctggaaattggagcaggtgtgtct

SEQ ID NO: 2563 - DNA, 95 bp, Artificial Sequence
  Description of Artificial Sequence: Synthetic primer
aatgatacggcgaccaccgagatctacactatagcctacactctttccctacacgacgctcttccgatctcattcacatactcatcctcggcctt

SEQ ID NO: 2564 - DNA, 102 bp, Artificial Sequence
  Description of Artificial Sequence: Synthetic polynucleotide
aatgatacggcgaccaccgagatctacactatagcctacactctttccctacacgacgctcttccgatctgtactttgtttatcttgatggaagtgaacttc

SEQ ID NO: 2565 - DNA, 93 bp, Artificial Sequence
  Description of Artificial Sequence: Synthetic primer
aatgatacggcgaccaccgagatctacactatagcctacactctttccctacacgacgctcttccgatctgccacaggagcttctggaattgt

SEQ ID NO: 2566 - DNA, 95 bp, Artificial Sequence
  Description of Artificial Sequence: Synthetic primer
aatgatacggcgaccaccgagatctacactatagcctacactctttccctacacgacgctcttccgatctaaacatggtaagcaaagaccgaaaa

SEQ ID NO: 2567 - DNA, 96 bp, Artificial Sequence
  Description of Artificial Sequence: Synthetic primer
aatgatacggcgaccaccgagatctacactatagcctacactctttccctacacgacgctcttccgatctaatctaggcatcacattgatttgagc

SEQ ID NO: 2568 - DNA, 98 bp, Artificial Sequence
  Description of Artificial Sequence: Synthetic primer
aatgatacggcgaccaccgagatctacactatagcctacactctttccctacacgacgctcttccgatctcatccatcatatcttccaaatcctcttc

SEQ ID NO: 2569 - DNA, 95 bp, Artificial Sequence
  Description of Artificial Sequence: Synthetic primer
aatgatacggcgaccaccgagatctacactatagcctacactctttccctacacgacgctcttccgatctctactcattttgcagtgagtttgcc

SEQ ID NO: 2570 - DNA, 99 bp, Artificial Sequence
  Description of Artificial Sequence: Synthetic primer
aatgatacggcgaccaccgagatctacactatagcctacactctttccctacacgacgctcttccgatcttgatgatggtgataacattattttgcagt

SEQ ID NO: 2571 - DNA, 101 bp, Artificial Sequence
  Description of Artificial Sequence: Synthetic polynucleotide
aatgatacggcgaccaccgagatctacactatagcctacactctttccctacacgacgctcttccgatctctgctttaggaaattaggcttatcaataggt

SEQ ID NO: 2572 - DNA, 98 bp, Artificial Sequence
  Description of Artificial Sequence: Synthetic primer
aatgatacggcgaccaccgagatctacactatagcctacactctttccctacacgacgctcttccgatcttttcaagcaagattgctctcaaaaagat

SEQ ID NO: 2573 - DNA, 100 bp, Artificial Sequence
  Description of Artificial Sequence: Synthetic polynucleotide
aatgatacggcgaccaccgagatctacactatagcctacactctttccctacacgacgctcttccgatctaaatgtaatttccatagaaattgacaggca

SEQ ID NO: 2574 - DNA, 100 bp, Artificial Sequence
  Description of Artificial Sequence: Synthetic polynucleotide
aatgatacggcgaccaccgagatctacactatagcctacactctttccctacacgacgctcttccgatcttatttgataatggagaaaaatgtgattgcc

SEQ ID NO: 2575 - DNA, 100 bp, Artificial Sequence
  Description of Artificial Sequence: Synthetic polynucleotide
aatgatacggcgaccaccgagatctacactatagcctacactctttccctacacgacgctcttccgatctacttaactaacgatatgcgttgttttttac

SEQ ID NO: 2576 - DNA, 99 bp, Artificial Sequence
  Description of Artificial Sequence: Synthetic primer
aatgatacggcgaccaccgagatctacactatagcctacactctttccctacacgacgctcttccgatctaacacatgaagaggagaaagaaatacctc

SEQ ID NO: 2577 - DNA, 97 bp, Artificial Sequence
  Description of Artificial Sequence: Synthetic primer
aatgatacggcgaccaccgagatctacactatagcctacactctttccctacacgacgctcttccgatctttgagcgacaaaatggaaacatggtag

SEQ ID NO: 2578 - DNA, 92 bp, Artificial Sequence
  Description of Artificial Sequence: Synthetic primer
aatgatacggcgaccaccgagatctacactatagcctacactctttccctacacgacgctcttccgatctacacataccaggtgagcccttg

SEQ ID NO: 2579 - DNA, 94 bp, Artificial Sequence
  Description of Artificial Sequence: Synthetic primer
aatgatacggcgaccaccgagatctacactatagcctacactctttccctacacgacgctcttccgatctaacacaccacagatgtcttcaggc

SEQ ID NO: 2580 - DNA, 97 bp, Artificial Sequence
  Description of Artificial Sequence: Synthetic primer
aatgatacggcgaccaccgagatctacactatagcctacactctttccctacacgacgctcttccgatctatcagaactaatcagtccttcaaagct

SEQ ID NO: 2581 - DNA, 96 bp, Artificial Sequence
  Description of Artificial Sequence: Synthetic primer
aatgatacggcgaccaccgagatctacactatagcctacactctttccctacacgacgctcttccgatctgtttggtccaaagaagaatgggaaaa

SEQ ID NO: 2582 - DNA, 94 bp, Artificial Sequence
  Description of Artificial Sequence: Synthetic primer
aatgatacggcgaccaccgagatctacactatagcctacactctttccctacacgacgctcttccgatcttgctcctcttgaaatctgtgagcc

SEQ ID NO: 2583 - DNA, 100 bp, Artificial Sequence
  Description of Artificial Sequence: Synthetic polynucleotide
aatgatacggcgaccaccgagatctacactatagcctacactctttccctacacgacgctcttccgatctattatattgttcatagcgcaacagttgcag

SEQ ID NO: 2584 - DNA, 100 bp, Artificial Sequence
  Description of Artificial Sequence: Synthetic polynucleotide
aatgatacggcgaccaccgagatctacactatagcctacactctttccctacacgacgctcttccgatcttttgtctacactttgtaaaataacttgcac

SEQ ID NO: 2585 - DNA, 101 bp, Artificial Sequence
  Description of Artificial Sequence: Synthetic polynucleotide
aatgatacggcgaccaccgagatctacactatagcctacactctttccctacacgacgctcttccgatctgcccagttctaactaaataatctgagctacc

SEQ ID NO: 2586 - DNA, 98 bp, Artificial Sequence
  Description of Artificial Sequence: Synthetic primer
aatgatacggcgaccaccgagatctacactatagcctacactctttccctacacgacgctcttccgatctgggcaatagtatctatacccaaagtact

SEQ ID NO: 2587 - DNA, 95 bp, Artificial Sequence
  Description of Artificial Sequence: Synthetic primer
aatgatacggcgaccaccgagatctacactatagcctacactctttccctacacgacgctcttccgatctctccagttgaaaggtggttggattg

SEQ ID NO: 2588 - DNA, 95 bp, Artificial Sequence
  Description of Artificial Sequence: Synthetic primer
aatgatacggcgaccaccgagatctacactatagcctacactctttccctacacgacgctcttccgatcttagggaaggaaaggagagcaggata

SEQ ID NO: 2589 - DNA, 93 bp, Artificial Sequence
  Description of Artificial Sequence: Synthetic primer
aatgatacggcgaccaccgagatctacactatagcctacactctttccctacacgacgctcttccgatctttgaccacatcaaacctgtgtgc

SEQ ID NO: 2590 - DNA, 101 bp, Artificial Sequence
  Description of Artificial Sequence: Synthetic polynucleotide
aatgatacggcgaccaccgagatctacactatagcctacactctttccctacacgacgctcttccgatctccacatagggtagaacattttgagaaattaa

SEQ ID NO: 2591 - DNA, 100 bp, Artificial Sequence
  Description of Artificial Sequence: Synthetic polynucleotide
aatgatacggcgaccaccgagatctacactatagcctacactctttccctacacgacgctcttccgatctttgataatgaaagcatatttgccattttgg

SEQ ID NO: 2592 - DNA, 98 bp, Artificial Sequence
  Description of Artificial Sequence: Synthetic primer
aatgatacggcgaccaccgagatctacactatagcctacactctttccctacacgacgctcttccgatctattcacaaagaagagaaagaaagccaca

SEQ ID NO: 2593 - DNA, 90 bp, Artificial Sequence
  Description of Artificial Sequence: Synthetic primer
aatgatacggcgaccaccgagatctacactatagcctacactctttccctacacgacgctcttccgatctccggagtgccagaaggaacc

SEQ ID NO: 2594 - DNA, 97 bp, Artificial Sequence
  Description of Artificial Sequence: Synthetic primer
aatgatacggcgaccaccgagatctacactatagcctacactctttccctacacgacgctcttccgatctgggaggacgatttattattacactggg

SEQ ID NO: 2595 - DNA, 91 bp, Artificial Sequence
  Description of Artificial Sequence: Synthetic primer
aatgatacggcgaccaccgagatctacactatagcctacactctttccctacacgacgctcttccgatctttctggcctcaagcagtcctc

SEQ ID NO: 2596 - DNA, 89 bp, Artificial Sequence
  Description of Artificial Sequence: Synthetic primer
aatgatacggcgaccaccgagatctacactatagcctacactctttccctacacgacgctcttccgatctggtgggcagggagatggaa

SEQ ID NO: 2597 - DNA, 89 bp, Artificial Sequence
  Description of Artificial Sequence: Synthetic primer
aatgatacggcgaccaccgagatctacactatagcctacactctttccctacacgacgctcttccgatctgatgggaggtgaggtggcc

SEQ ID NO: 2598 - DNA, 90 bp, Artificial Sequence
  Description of Artificial Sequence: Synthetic primer
aatgatacggcgaccaccgagatctacactatagcctacactctttccctacacgacgctcttccgatctatgaggcagggaagccctca

SEQ ID NO: 2599 - DNA, 89 bp, Artificial Sequence
  Description of Artificial Sequence: Synthetic primer
aatgatacggcgaccaccgagatctacactatagcctacactctttccctacacgacgctcttccgatctggtgaggctggctagggag

SEQ ID NO: 2600 - DNA, 90 bp, Artificial Sequence
  Description of Artificial Sequence: Synthetic primer
aatgatacggcgaccaccgagatctacactatagcctacactctttccctacacgacgctcttccgatcttgcccttcctgaagtctggg

SEQ ID NO: 2601 - DNA, 91 bp, Artificial Sequence
  Description of Artificial Sequence: Synthetic primer
aatgatacggcgaccaccgagatctacactatagcctacactctttccctacacgacgctcttccgatctggcctcacttctccgtctccc

SEQ ID NO: 2602 - DNA, 94 bp, Artificial Sequence
  Description of Artificial Sequence: Synthetic primer
aatgatacggcgaccaccgagatctacactatagcctacactctttccctacacgacgctcttccgatctctatcctcttcgtcctaacagccc

SEQ ID NO: 2603 - DNA, 89 bp, Artificial Sequence
  Description of Artificial Sequence: Synthetic primer
aatgatacggcgaccaccgagatctacactatagcctacactctttccctacacgacgctcttccgatctcggctcctcgtgtcccact

SEQ ID NO: 2604 - DNA, 96 bp, Artificial Sequence
  Description of Artificial Sequence: Synthetic primer
aatgatacggcgaccaccgagatctacactatagcctacactctttccctacacgacgctcttccgatctgggacatgagagttaatagatccaca

SEQ ID NO: 2605 - DNA, 97 bp, Artificial Sequence
  Description of Artificial Sequence: Synthetic primer
aatgatacggcgaccaccgagatctacactatagcctacactctttccctacacgacgctcttccgatcttcaaaacttgggagaagagcaaaacct

SEQ ID NO: 2606 - DNA, 100 bp, Artificial Sequence
  Description of Artificial Sequence: Synthetic polynucleotide
aatgatacggcgaccaccgagatctacactatagcctacactctttccctacacgacgctcttccgatcttatggaagactgagttatagtcaactgaca

SEQ ID NO: 2607 - DNA, 100 bp, Artificial Sequence
  Description of Artificial Sequence: Synthetic polynucleotide
aatgatacggcgaccaccgagatctacactatagcctacactctttccctacacgacgctcttccgatctttcttactgttgtgtggtacaaacattttt

SEQ ID NO: 2608 - DNA, 97 bp, Artificial Sequence
  Description of Artificial Sequence: Synthetic primer
aatgatacggcgaccaccgagatctacactatagcctacactctttccctacacgacgctcttccgatcttccactaatggaaaggaacagtgatgc

SEQ ID NO: 2609 - DNA, 96 bp, Artificial Sequence
  Description of Artificial Sequence: Synthetic primer
aatgatacggcgaccaccgagatctacactatagcctacactctttccctacacgacgctcttccgatctgcagcggttcttttggcatacaattt

SEQ ID NO: 2610 - DNA, 97 bp, Artificial Sequence
  Description of Artificial Sequence: Synthetic primer
aatgatacggcgaccaccgagatctacactatagcctacactctttccctacacgacgctcttccgatcttgttattgctgttattgtggttgtggt

SEQ ID NO: 2611 - DNA, 101 bp, Artificial Sequence
  Description of Artificial Sequence: Synthetic polynucleotide
aatgatacggcgaccaccgagatctacactatagcctacactctttccctacacgacgctcttccgatctgtcctaaaacaatagttgtctttcttccact

SEQ ID NO: 2612 - DNA, 100 bp, Artificial Sequence
  Description of Artificial Sequence: Synthetic polynucleotide
aatgatacggcgaccaccgagatctacactatagcctacactctttccctacacgacgctcttccgatctgaatttttttctgtgctttttcctgtttca

SEQ ID NO: 2613 - DNA, 92 bp, Artificial Sequence
  Description of Artificial Sequence: Synthetic primer
aatgatacggcgaccaccgagatctacactatagcctacactctttccctacacgacgctcttccgatctcattgggaccggagaaaccagg

SEQ ID NO: 2614 - DNA, 93 bp, Artificial Sequence
  Description of Artificial Sequence: Synthetic primer
aatgatacggcgaccaccgagatctacactatagcctacactctttccctacacgacgctcttccgatctctctgacccatctgctctctcct

SEQ ID NO: 2615 - DNA, 92 bp, Artificial Sequence
  Description of Artificial Sequence: Synthetic primer
aatgatacggcgaccaccgagatctacactatagcctacactctttccctacacgacgctcttccgatctggcagtgttcctatttcagccc

SEQ ID NO: 2616 - DNA, 93 bp, Artificial Sequence
  Description of Artificial Sequence: Synthetic primer
aatgatacggcgaccaccgagatctacactatagcctacactctttccctacacgacgctcttccgatctaagggaagcagaaggtgacagaa

SEQ ID NO: 2617 - DNA, 92 bp, Artificial Sequence
  Description of Artificial Sequence: Synthetic primer
aatgatacggcgaccaccgagatctacactatagcctacactctttccctacacgacgctcttccgatcttctctctcactgcctgtctctg

SEQ ID NO: 2618 - DNA, 92 bp, Artificial Sequence
  Description of Artificial Sequence: Synthetic primer
aatgatacggcgaccaccgagatctacactatagcctacactctttccctacacgacgctcttccgatctcctgcctggtactgccctattg

SEQ ID NO: 2619 - DNA, 89 bp, Artificial Sequence
  Description of Artificial Sequence: Synthetic primer
aatgatacggcgaccaccgagatctacactatagcctacactctttccctacacgacgctcttccgatctgatgagggtctggtgccca

SEQ ID NO: 2620 - DNA, 90 bp, Artificial Sequence
  Description of Artificial Sequence: Synthetic primer
aatgatacggcgaccaccgagatctacactatagcctacactctttccctacacgacgctcttccgatctacagtgaaagccagccacct

SEQ ID NO: 2621 - DNA, 88 bp, Artificial Sequence
  Description of Artificial Sequence: Synthetic primer
aatgatacggcgaccaccgagatctacactatagcctacactctttccctacacgacgctcttccgatctgggccagggtatgtggct

SEQ ID NO: 2622 - DNA, 92 bp, Artificial Sequence
  Description of Artificial Sequence: Synthetic primer
aatgatacggcgaccaccgagatctacactatagcctacactctttccctacacgacgctcttccgatctacctcctcagtgtgctatggtc

SEQ ID NO: 2623 - DNA, 91 bp, Artificial Sequence
  Description of Artificial Sequence: Synthetic primer
aatgatacggcgaccaccgagatctacactatagcctacactctttccctacacgacgctcttccgatctctgctgactcctctcctgacc

SEQ ID NO: 2624 - DNA, 91 bp, Artificial Sequence
  Description of Artificial Sequence: Synthetic primer
aatgatacggcgaccaccgagatctacactatagcctacactctttccctacacgacgctcttccgatctctgacctcagcgtcttccaga

SEQ ID NO: 2625 - DNA, 91 bp, Artificial Sequence; identical to SEQ ID NO: 2623
  Description of Artificial Sequence: Synthetic primer

SEQ ID NO: 2626 - DNA, 90 bp, Artificial Sequence
  Description of Artificial Sequence: Synthetic primer
aatgatacggcgaccaccgagatctacactatagcctacactctttccctacacgacgctcttccgatctggtccgtggtaaggtgccca

SEQ ID NO: 2627 - DNA, 94 bp, Artificial Sequence
  Description of Artificial Sequence: Synthetic primer
aatgatacggcgaccaccgagatctacactatagcctacactctttccctacacgacgctcttccgatctcccactcctttaatctcaccctct

SEQ ID NO: 2628 - DNA, 91 bp, Artificial Sequence
  Description of Artificial Sequence: Synthetic primer
aatgatacggcgaccaccgagatctacactatagcctacactctttccctacacgacgctcttccgatctactgagggaactgggcagtgg

SEQ ID NO: 2629 - DNA, 90 bp, Artificial Sequence
  Description of Artificial Sequence: Synthetic primer
aatgatacggcgaccaccgagatctacactatagcctacactctttccctacacgacgctcttccgatctcggtcccttcctcctcactg

SEQ ID NO: 2630 - DNA, 94 bp, Artificial Sequence
  Description of Artificial Sequence: Synthetic primer
aatgatacggcgaccaccgagatctacactatagcctacactctttccctacacgacgctcttccgatctgtatgtgaatgccaggcactgttt

SEQ ID NO: 2631 - DNA, 91 bp, Artificial Sequence
  Description of Artificial Sequence: Synthetic primer
aatgatacggcgaccaccgagatctacactatagcctacactctttccctacacgacgctcttccgatcttaagggcctgatcctactgcc

SEQ ID NO: 2632 - DNA, 97 bp, Artificial Sequence
  Description of Artificial Sequence: Synthetic primer
aatgatacggcgaccaccgagatctacactatagcctacactctttccctacacgacgctcttccgatcttcccagaattgttgatgagactgtttc

SEQ ID NO: 2633 - DNA, 90 bp, Artificial Sequence
  Description of Artificial Sequence: Synthetic primer
aatgatacggcgaccaccgagatctacactatagcctacactctttccctacacgacgctcttccgatctatccctgaccctggcttccg

SEQ ID NO: 2634 - DNA, 89 bp, Artificial Sequence
  Description of Artificial Sequence: Synthetic primer
aatgatacggcgaccaccgagatctacactatagcctacactctttccctacacgacgctcttccgatctgggagggcagttacagcgg

SEQ ID NO: 2635 - DNA, 89 bp, Artificial Sequence
  Description of Artificial Sequence: Synthetic primer
aatgatacggcgaccaccgagatctacactatagcctacactctttccctacacgacgctcttccgatcttgaagtcctcccagcccgc

SEQ ID NO: 2636 - DNA, 95 bp, Artificial Sequence
  Description of Artificial Sequence: Synthetic primer
aatgatacggcgaccaccgagatctacactatagcctacactctttccctacacgacgctcttccgatctgtgaaggatgtttggaggacaagta

SEQ ID NO: 2637 - DNA, 92 bp, Artificial Sequence
  Description of Artificial Sequence: Synthetic primer
aatgatacggcgaccaccgagatctacactatagcctacactctttccctacacgacgctcttccgatctcccataccctctcagcgtaccc

SEQ ID NO: 2638 - DNA, 91 bp, Artificial Sequence
  Description of Artificial Sequence: Synthetic primer
aatgatacggcgaccaccgagatctacactatagcctacactctttccctacacgacgctcttccgatctggccctcccagaaggtctaca

SEQ ID NO: 2639 - DNA, 92 bp, Artificial Sequence; identical to SEQ ID NO: 2637
  Description of Artificial Sequence: Synthetic primer

SEQ ID NO: 2640 - DNA, 92 bp, Artificial Sequence
  Description of Artificial Sequence: Synthetic primer
aatgatacggcgaccaccgagatctacactatagcctacactctttccctacacgacgctcttccgatctgtgaaggaccaaggagcagagg

SEQ ID NO: 2641 - DNA, 91 bp, Artificial Sequence
  Description of Artificial Sequence: Synthetic primer
aatgatacggcgaccaccgagatctacactatagcctacactctttccctacacgacgctcttccgatctcctcccactcctgaccctgtc

SEQ ID NO: 2642 - DNA, 90 bp, Artificial Sequence
  Description of Artificial Sequence: Synthetic primer
aatgatacggcgaccaccgagatctacactatagcctacactctttccctacacgacgctcttccgatctgcacacagggcctgggacta

SEQ ID NO: 2643 - DNA, 90 bp, Artificial Sequence
  Description of Artificial Sequence: Synthetic primer
aatgatacggcgaccaccgagatctacactatagcctacactctttccctacacgacgctcttccgatctgctcactgctggaggacgat

SEQ ID NO: 2644 - DNA, 90 bp, Artificial Sequence; identical to SEQ ID NO: 2642
  Description of Artificial Sequence: Synthetic primer

SEQ ID NO: 2645 - DNA, 90 bp, Artificial Sequence
  Description of Artificial Sequence: Synthetic primer
aatgatacggcgaccaccgagatctacactatagcctacactctttccctacacgacgctcttccgatctcacaggcaccgcagctcatc

SEQ ID NO: 2646 - DNA, 98 bp, Artificial Sequence
  Description of Artificial Sequence: Synthetic primer
aatgatacggcgaccaccgagatctacactatagcctacactctttccctacacgacgctcttccgatctcgatgtatttgatggtgacctgggaatg

SEQ ID NO: 2647 - DNA, 91 bp, Artificial Sequence
  Description of Artificial Sequence: Synthetic primer
aatgatacggcgaccaccgagatctacactatagcctacactctttccctacacgacgctcttccgatctcactctggaaaggcccaagac

SEQ ID NO: 2648 - DNA, 90 bp, Artificial Sequence
  Description of Artificial Sequence: Synthetic primer
aatgatacggcgaccaccgagatctacactatagcctacactctttccctacacgacgctcttccgatctgggccgggacgatgactctg

SEQ ID NO: 2649 - DNA, 89 bp, Artificial Sequence
  Description of Artificial Sequence: Synthetic primer
aatgatacggcgaccaccgagatctacactatagcctacactctttccctacacgacgctcttccgatctgcagcacgagagtcaggcc

SEQ ID NO: 2650 - DNA, 92 bp, Artificial Sequence
  Description of Artificial Sequence: Synthetic primer
aatgatacggcgaccaccgagatctacactatagcctacactctttccctacacgacgctcttccgatctctttctggtggatgtgtggccc

SEQ ID NO: 2651 - DNA, 90 bp, Artificial Sequence
  Description of Artificial Sequence: Synthetic primer
aatgatacggcgaccaccgagatctacactatagcctacactctttccctacacgacgctcttccgatcttgagcacccaccgctgtgtt

SEQ ID NO: 2652 - DNA, 89 bp, Artificial Sequence
  Description of Artificial Sequence: Synthetic primer
aatgatacggcgaccaccgagatctacactatagcctacactctttccctacacgacgctcttccgatctcctggcgctgtgtcctttc

SEQ ID NO: 2653 - DNA, 91 bp, Artificial Sequence
  Description of Artificial Sequence: Synthetic primer
aatgatacggcgaccaccgagatctacactatagcctacactctttccctacacgacgctcttccgatctccggaccatcatcacctaccc

SEQ ID NO: 2654 - DNA, 89 bp, Artificial Sequence
  Description of Artificial Sequence: Synthetic primer
aatgatacggcgaccaccgagatctacactatagcctacactctttccctacacgacgctcttccgatctcagcctcaccctctgccct

SEQ ID NO: 2655 - DNA, 92 bp, Artificial Sequence
  Description of Artificial Sequence: Synthetic primer
aatgatacggcgaccaccgagatctacactatagcctacactctttccctacacgacgctcttccgatctctcaggagtcaccaggaaccgt

SEQ ID NO: 2656 - DNA, 91 bp, Artificial Sequence
  Description of Artificial Sequence: Synthetic primer
aatgatacggcgaccaccgagatctacactatagcctacactctttccctacacgacgctcttccgatctggagaagctcagcctgggagg

SEQ ID NO: 2657 - DNA, 93 bp, Artificial Sequence
  Description of Artificial Sequence: Synthetic primer
aatgatacggcgaccaccgagatctacactatagcctacactctttccctacacgacgctcttccgatctaccttgtcggcaaagaccatgag

SEQ ID NO: 2658 - DNA, 91 bp, Artificial Sequence; identical to SEQ ID NO: 2656
  Description of Artificial Sequence: Synthetic primer

SEQ ID NO: 2659 - DNA, 91 bp, Artificial Sequence
  Description of Artificial Sequence: Synthetic primer
aatgatacggcgaccaccgagatctacactatagcctacactctttccctacacgacgctcttccgatctctggaactggtcccgcaggta

SEQ ID NO: 2660 - DNA, 93 bp, Artificial Sequence
  Description of Artificial Sequence: Synthetic primer
aatgatacggcgaccaccgagatctacactatagcctacactctttccctacacgacgctcttccgatctgtcgattccctcggacactttgc

SEQ ID NO: 2661 - DNA, 91 bp, Artificial Sequence
  Description of Artificial Sequence: Synthetic primer
aatgatacggcgaccaccgagatctacactatagcctacactctttccctacacgacgctcttccgatctagctctgggaagacacctggg

SEQ ID NO: 2662 - DNA, 90 bp, Artificial Sequence
  Description of Artificial Sequence: Synthetic primer
aatgatacggcgaccaccgagatctacactatagcctacactctttccctacacgacgctcttccgatctcggcaccatcctgggtctca

SEQ ID NO: 2663 - DNA, 90 bp, Artificial Sequence
  Description of Artificial Sequence: Synthetic primer
aatgatacggcgaccaccgagatctacactatagcctacactctttccctacacgacgctcttccgatctccagggactgaggagagcag

SEQ ID NO: 2664 - DNA, 90 bp, Artificial Sequence
  Description of Artificial Sequence: Synthetic primer
aatgatacggcgaccaccgagatctacactatagcctacactctttccctacacgacgctcttccgatctggaacccacagaaaccagcc

SEQ ID NO: 2665 - DNA, 89 bp, Artificial Sequence
  Description of Artificial Sequence: Synthetic primer
aatgatacggcgaccaccgagatctacactatagcctacactctttccctacacgacgctcttccgatctagccctagcctctcccact

SEQ ID NO: 2666 - DNA, 88 bp, Artificial Sequence
  Description of Artificial Sequence: Synthetic primer
aatgatacggcgaccaccgagatctacactatagcctacactctttccctacacgacgctcttccgatctagcgaggcgtccatgcag

SEQ ID NO: 2667 - DNA, 96 bp, Artificial Sequence
  Description of Artificial Sequence: Synthetic primer
aatgatacggcgaccaccgagatctacactatagcctacactctttccctacacgacgctcttccgatctttcccatctggaatataagttctggg

SEQ ID NO: 2668 - DNA, 91 bp, Artificial Sequence
  Description of Artificial Sequence: Synthetic primer
aatgatacggcgaccaccgagatctacactatagcctacactctttccctacacgacgctcttccgatctcccagcagggacagaaaaagg

SEQ ID NO: 2669 - DNA, 90 bp, Artificial Sequence
  Description of Artificial Sequence: Synthetic primer
aatgatacggcgaccaccgagatctacactatagcctacactctttccctacacgacgctcttccgatctggctctgcataaccgggacc

SEQ ID NO: 2670 - DNA, 90 bp, Artificial Sequence
  Description of Artificial Sequence: Synthetic primer
aatgatacggcgaccaccgagatctacactatagcctacactctttccctacacgacgctcttccgatctcaggcgctgctcgtctgtct

SEQ ID NO: 2671 - DNA, 90 bp, Artificial Sequence; identical to SEQ ID NO: 2669
  Description of Artificial Sequence: Synthetic primer

SEQ ID NO: 2672 - DNA, 89 bp, Artificial Sequence
  Description of Artificial Sequence: Synthetic primer
aatgatacggcgaccaccgagatctacactatagcctacactctttccctacacgacgctcttccgatctgcagggtctccaggttgcc

SEQ ID NO: 2673 - DNA, 91 bp, Artificial Sequence
  Description of Artificial Sequence: Synthetic primer
aatgatacggcgaccaccgagatctacactatagcctacactctttccctacacgacgctcttccgatcttcctgcggagagatgagctgg

SEQ ID NO: 2674 - DNA, 95 bp, Artificial Sequence
  Description of Artificial Sequence: Synthetic primer
aatgatacggcgaccaccgagatctacactatagcctacactctttccctacacgacgctcttccgatctgctataaaccaccacattggcatgc

SEQ ID NO: 2675 - DNA, 93 bp, Artificial Sequence
  Description of Artificial Sequence: Synthetic primer
aatgatacggcgaccaccgagatctacactatagcctacactctttccctacacgacgctcttccgatctgggcatcaaattcctgggacaag

SEQ ID NO: 2676 - DNA, 94 bp, Artificial Sequence
  Description of Artificial Sequence: Synthetic primer
aatgatacggcgaccaccgagatctacactatagcctacactctttccctacacgacgctcttccgatctgctaagggcaaggagaaggaacag

SEQ ID NO: 2677 - DNA, 90 bp, Artificial Sequence
  Description of Artificial Sequence: Synthetic primer
aatgatacggcgaccaccgagatctacactatagcctacactctttccctacacgacgctcttccgatctcgaaagctggtgacggccac

SEQ ID NO: 2678 - DNA, 94 bp, Artificial Sequence; identical to SEQ ID NO: 2676
  Description of Artificial Sequence: Synthetic primer

SEQ ID NO: 2679 - DNA, 93 bp, Artificial Sequence
  Description of Artificial Sequence: Synthetic primer
aatgatacggcgaccaccgagatctacactatagcctacactctttccctacacgacgctcttccgatcttatgcctgccgataacaagcgga

SEQ ID NO: 2680 - DNA, 89 bp, Artificial Sequence
  Description of Artificial Sequence: Synthetic primer
aatgatacggcgaccaccgagatctacactatagcctacactctttccctacacgacgctcttccgatctttaggcccaggcgtggcag

SEQ ID NO: 2681 - DNA, 91 bp, Artificial Sequence
  Description of Artificial Sequence: Synthetic primer
aatgatacggcgaccaccgagatctacactatagcctacactctttccctacacgacgctcttccgatctcgctatcactgctgctccctg

SEQ ID NO: 2682 - DNA, 91 bp, Artificial Sequence
  Description of Artificial Sequence: Synthetic primer
aatgatacggcgaccaccgagatctacactatagcctacactctttccctacacgacgctcttccgatctagcgccggtcttgaacgaagt

SEQ ID NO: 2683 - DNA, 95 bp, Artificial Sequence
  Description of Artificial Sequence: Synthetic primer
aatgatacggcgaccaccgagatctacactatagcctacactctttccctacacgacgctcttccgatctcacctggaacctcctcacccattta

SEQ ID NO: 2684 - DNA, 95 bp, Artificial Sequence
  Description of Artificial Sequence: Synthetic primer
aatgatacggcgaccaccgagatctacactatagcctacactctttccctacacgacgctcttccgatcttcctagtctaaccagaagccaaatg

SEQ ID NO: 2685 - DNA, 94 bp, Artificial Sequence
  Description of Artificial Sequence: Synthetic primer
aatgatacggcgaccaccgagatctacactatagcctacactctttccctacacgacgctcttccgatcttaagaggagtgacctcctgcaaca

SEQ ID NO: 2686 - DNA, 96 bp, Artificial Sequence
  Description of Artificial Sequence: Synthetic primer
aatgatacggcgaccaccgagatctacactatagcctacactctttccctacacgacgctcttccgatctcactgtccaggaatcatagtgtaccc

SEQ ID NO: 2687 - DNA, 91 bp, Artificial Sequence
  Description of Artificial Sequence: Synthetic primer
aatgatacggcgaccaccgagatctacactatagcctacactctttccctacacgacgctcttccgatctagaaactggcctggaggaagc

SEQ ID NO: 2688 - DNA, 91 bp, Artificial Sequence
  Description of Artificial Sequence: Synthetic primer
aatgatacggcgaccaccgagatctacactatagcctacactctttccctacacgacgctcttccgatctaggaggaggccctttcccaga

SEQ ID NO: 2689 - DNA, 95 bp, Artificial Sequence
  Description of Artificial Sequence: Synthetic primer
aatgatacggcgaccaccgagatctacactatagcctacactctttccctacacgacgctcttccgatctggtttgtctgttcagcaagtggaca

SEQ ID NO: 2690 - DNA, 93 bp, Artificial Sequence
  Description of Artificial Sequence: Synthetic primer
aatgatacggcgaccaccgagatctacactatagcctacactctttccctacacgacgctcttccgatctatggtggaccacatcttgaactg

SEQ ID NO: 2691 - DNA, 91 bp, Artificial Sequence
  Description of Artificial Sequence: Synthetic primer
aatgatacggcgaccaccgagatctacactatagcctacactctttccctacacgacgctcttccgatctacacaacagcctgaccacctt

SEQ ID NO: 2692 - DNA, 93 bp, Artificial Sequence
  Description of Artificial Sequence: Synthetic primer
aatgatacggcgaccaccgagatctacactatagcctacactctttccctacacgacgctcttccgatctcagtgaaggaaccaggaggaagg

SEQ ID NO: 2693 - DNA, 93 bp, Artificial Sequence
  Description of Artificial Sequence: Synthetic primer
aatgatacggcgaccaccgagatctacactatagcctacactctttccctacacgacgctcttccgatctggagtccacatacggcagatttg

SEQ ID NO: 2694 - DNA, 92 bp, Artificial Sequence
  Description of Artificial Sequence: Synthetic primer
aatgatacggcgaccaccgagatctacactatagcctacactctttccctacacgacgctcttccgatctgcagaaagtgacagtgccttgg

SEQ ID NO: 2695 - DNA, 92 bp, Artificial Sequence
  Description of Artificial Sequence: Synthetic primer
aatgatacggcgaccaccgagatctacactatagcctacactctttccctacacgacgctcttccgatcttacattagcagggcaggtggaa

SEQ ID NO: 2696 - DNA, 97 bp, Artificial Sequence
  Description of Artificial Sequence: Synthetic primer
aatgatacggcgaccaccgagatctacactatagcctacactctttccctacacgacgctcttccgatctagtcttgggcatatttgtaaactggag

SEQ ID NO: 2697 - DNA, 89 bp, Artificial Sequence
  Description of Artificial Sequence: Synthetic primer
aatgatacggcgaccaccgagatctacactatagcctacactctttccctacacgacgctcttccgatctggccctgcccaagctaagg

SEQ ID NO: 2698 - DNA, 89 bp, Artificial Sequence
  Description of Artificial Sequence: Synthetic primer
aatgatacggcgaccaccgagatctacactatagcctacactctttccctacacgacgctcttccgatctggcagtcgtggctgagcgt

SEQ ID NO: 2699 - DNA, 90 bp, Artificial Sequence
  Description of Artificial Sequence: Synthetic primer
aatgatacggcgaccaccgagatctacactatagcctacactctttccctacacgacgctcttccgatctggtccgctcttaggacgcag

SEQ ID NO: 2700 - DNA, 96 bp, Artificial Sequence
  Description of Artificial Sequence: Synthetic primer
aatgatacggcgaccaccgagatctacactatagcctacactctttccctacacgacgctcttccgatctgaggatgaagagaaaaatcccggagt

SEQ ID NO: 2701 - DNA, 99 bp, Artificial Sequence
  Description of Artificial Sequence: Synthetic primer
aatgatacggcgaccaccgagatctacactatagcctacactctttccctacacgacgctcttccgatcttttctagtggtctaatatcctgaagtgag

SEQ ID NO: 2702 - DNA, 94 bp, Artificial Sequence
  Description of Artificial Sequence: Synthetic primer
aatgatacggcgaccaccgagatctacactatagcctacactctttccctacacgacgctcttccgatctcatcctgagcagggtctgcataat

SEQ ID NO: 2703 - DNA, 92 bp, Artificial Sequence
  Description of Artificial Sequence: Synthetic primer
aatgatacggcgaccaccgagatctacactatagcctacactctttccctacacgacgctcttccgatctgagcagagccttgcatacaagt

SEQ ID NO: 2704 - DNA, 101 bp, Artificial Sequence
  Description of Artificial Sequence: Synthetic polynucleotide
aatgatacggcgaccaccgagatctacactatagcctacactctttccctacacgacgctcttccgatcttcacagattatatgcaactgtgtttagccaa

SEQ ID NO: 2705 - DNA, 100 bp, Artificial Sequence
  Description of Artificial Sequence: Synthetic polynucleotide
aatgatacggcgaccaccgagatctacactatagcctacactctttccctacacgacgctcttccgatcttgaagtaaagcatgaaatcttgactgatat

SEQ ID NO: 2706 - DNA, 103 bp, Artificial Sequence
  Description of Artificial Sequence: Synthetic polynucleotide
aatgatacggcgaccaccgagatctacactatagcctacactctttccctacacgacgctcttccgatcttatgaaactaccatcaatgaaaaaagccaattg

SEQ ID NO: 2707 - DNA, 97 bp, Artificial Sequence
  Description of Artificial Sequence: Synthetic primer
aatgatacggcgaccaccgagatctacactatagcctacactctttccctacacgacgctcttccgatctatcttgataaaaggtatcaggcaccat

SEQ ID NO: 2708 - DNA, 101 bp, Artificial Sequence
  Description of Artificial Sequence: Synthetic polynucleotide
aatgatacggcgaccaccgagatctacactatagcctacactctttccctacacgacgctcttccgatctactgaatggtgagaagtgttttaattcttct

SEQ ID NO: 2709 - DNA, 100 bp, Artificial Sequence
  Description of Artificial Sequence: Synthetic polynucleotide
aatgatacggcgaccaccgagatctacactatagcctacactctttccctacacgacgctcttccgatcttgagagatggaaaaggaataccgtttactg

SEQ ID NO: 2710 - DNA, 91 bp, Artificial Sequence
  Description of Artificial Sequence: Synthetic primer
aatgatacggcgaccaccgagatctacactatagcctacactctttccctacacgacgctcttccgatcttcattggccctgtcagtttgc

SEQ ID NO: 2711 - DNA, 100 bp, Artificial Sequence
  Description of Artificial Sequence: Synthetic polynucleotide
aatgatacggcgaccaccgagatctacactatagcctacactctttccctacacgacgctcttccgatctcttgatgattgcaggatcattttaatgttt

SEQ ID NO: 2712 - DNA, 91 bp, Artificial Sequence
  Description of Artificial Sequence: Synthetic primer
aatgatacggcgaccaccgagatctacactatagcctacactctttccctacacgacgctcttccgatctgtccgagagcctcctgaggga

SEQ ID NO: 2713 - DNA, 102 bp, Artificial Sequence
  Description of Artificial Sequence: Synthetic polynucleotide
aatgatacggcgaccaccgagatctacactatagcctacactctttccctacacgacgctcttccgatctcaggctttttgtaaacaaaactcatttggatt

SEQ ID NO: 2714 - DNA, 92 bp, Artificial Sequence
  Description of Artificial Sequence: Synthetic primer
aatgatacggcgaccaccgagatctacactatagcctacactctttccctacacgacgctcttccgatctttcggcattccctacatccagg

SEQ ID NO: 2715 - DNA, 105 bp, Artificial Sequence
  Description of Artificial Sequence: Synthetic polynucleotide
aatgatacggcgaccaccgagatctacactatagcctacactctttccctacacgacgctcttccgatctgttggatatagatatagatatacacacgtacatga

SEQ ID NO: 2716 - DNA, 99 bp, Artificial Sequence
  Description of Artificial Sequence: Synthetic primer
aatgatacggcgaccaccgagatctacactatagcctacactctttccctacacgacgctcttccgatctctcattgctgtgtaagtaattgtttcctt

SEQ ID NO: 2717 - DNA, 100 bp, Artificial Sequence
  Description of Artificial Sequence: Synthetic polynucleotide
aatgatacggcgaccaccgagatctacactatagcctacactctttccctacacgacgctcttccgatctctttggacctttttatttgtcacttgttta

SEQ ID NO: 2718 - DNA, 100 bp, Artificial Sequence
  Description of Artificial Sequence: Synthetic polynucleotide
aatgatacggcgaccaccgagatctacactatagcctacactctttccctacacgacgctcttccgatcttggtttagaaacttgacttacttgtctgat

SEQ ID NO: 2719 - DNA, 92 bp, Artificial Sequence
  Description of Artificial Sequence: Synthetic primer
aatgatacggcgaccaccgagatctacactatagcctacactctttccctacacgacgctcttccgatctcgcagaactcagtgaaggaagc

SEQ ID NO: 2720 - DNA, 97 bp, Artificial Sequence
  Description of Artificial Sequence: Synthetic primer
aatgatacggcgaccaccgagatctacactatagcctacactctttccctacacgacgctcttccgatctaaaagggacttgaaagtttaggaagca

SEQ ID NO: 2721 - DNA, 94 bp, Artificial Sequence
  Description of Artificial Sequence: Synthetic primer
aatgatacggcgaccaccgagatctacactatagcctacactctttccctacacgacgctcttccgatctttttagccaagagtgaggaggaag

SEQ ID NO: 2722 - DNA, 99 bp, Artificial Sequence
  Description of Artificial Sequence: Synthetic primer
aatgatacggcgaccaccgagatctacactatagcctacactctttccctacacgacgctcttccgatctccctggaaagcaaaaaggttatctatatt

SEQ ID NO: 2723 - DNA, 98 bp, Artificial Sequence
  Description of Artificial Sequence: Synthetic primer
aatgatacggcgaccaccgagatctacactatagcctacactctttccctacacgacgctcttccgatctttctagccttagttgtttggactccttg

SEQ ID NO: 2724 - DNA, 92 bp, Artificial Sequence
  Description of Artificial Sequence: Synthetic primer
aatgatacggcgaccaccgagatctacactatagcctacactctttccctacacgacgctcttccgatctaatcctagcatccctgtggcaa

SEQ ID NO: 2725 - DNA, 97 bp, Artificial Sequence
  Description of Artificial Sequence: Synthetic primer
aatgatacggcgaccaccgagatctacactatagcctacactctttccctacacgacgctcttccgatcttttcatcaccagatggcatagaagttt

SEQ ID NO: 2726 - DNA, 99 bp, Artificial Sequence
  Description of Artificial Sequence: Synthetic primer
aatgatacggcgaccaccgagatctacactatagcctacactctttccctacacgacgctcttccgatctttatgtaatacctgcaaaaattgcacttg

SEQ ID NO: 2727 - DNA, 91 bp, Artificial Sequence
  Description of Artificial Sequence: Synthetic primer
aatgatacggcgaccaccgagatctacactatagcctacactctttccctacacgacgctcttccgatctgggaacgcacagccaagagtg

SEQ ID NO: 2728 - DNA, 103 bp, Artificial Sequence
  Description of Artificial Sequence: Synthetic polynucleotide
aatgatacggcgaccaccgagatctacactatagcctacactctttccctacacgacgctcttccgatctcgctaaccatgaaactatatttctactaataca

SEQ ID NO: 2729 - DNA, 97 bp, Artificial Sequence
  Description of Artificial Sequence: Synthetic primer
aatgatacggcgaccaccgagatctacactatagcctacactctttccctacacgacgctcttccgatctccactcaacttccctgttacattcaca

SEQ ID NO: 2730 - DNA, 94 bp, Artificial Sequence
  Description of Artificial Sequence: Synthetic primer
aatgatacggcgaccaccgagatctacactatagcctacactctttccctacacgacgctcttccgatctgtttcccgtctgaagtctgtgcac

SEQ ID NO: 2731 - DNA, 94 bp, Artificial Sequence
  Description of Artificial Sequence: Synthetic primer
aatgatacggcgaccaccgagatctacactatagcctacactctttccctacacgacgctcttccgatctggacctccagaaaagagatcaggg

SEQ ID NO: 2732 - DNA, 104 bp, Artificial Sequence
  Description of Artificial Sequence: Synthetic polynucleotide
aatgatacggcgaccaccgagatctacactatagcctacactctttccctacacgacgctcttccgatctcaattcatttctccagcttctattttttagctga

SEQ ID NO: 2733 - DNA, 97 bp, Artificial Sequence
  Description of Artificial Sequence: Synthetic primer
aatgatacggcgaccaccgagatctacactatagcctacactctttccctacacgacgctcttccgatctgaagggaaagacacacttgtgctttag

SEQ ID NO: 2734 - DNA, 103 bp, Artificial Sequence
  Description of Artificial Sequence: Synthetic polynucleotide
aatgatacggcgaccaccgagatctacactatagcctacactctttccctacacgacgctcttccgatctttggctacaaattatagtatttaataggagcac

SEQ ID NO: 2735 - DNA, 96 bp, Artificial Sequence
  Description of Artificial Sequence: Synthetic primer
aatgatacggcgaccaccgagatctacactatagcctacactctttccctacacgacgctcttccgatctttctccacttggaaatctcccttgtt

SEQ ID NO: 2736 - DNA, 99 bp, Artificial Sequence
  Description of Artificial Sequence: Synthetic primer
aatgatacggcgaccaccgagatctacactatagcctacactctttccctacacgacgctcttccgatctgggcattaaaacaaaacaaaaaggtactg

SEQ ID NO: 2737 - DNA, 94 bp, Artificial Sequence
  Description of Artificial Sequence: Synthetic primer
aatgatacggcgaccaccgagatctacactatagcctacactctttccctacacgacgctcttccgatctaagaccctcctccacagcaataca

SEQ ID NO: 2738 - DNA, 102 bp, Artificial Sequence
  Description of Artificial Sequence: Synthetic polynucleotide
aatgatacggcgaccaccgagatctacactatagcctacactctttccctacacgacgctcttccgatctcttgatagcaaatagaaaggaaagaacatatg

SEQ ID NO: 2739 - DNA, 101 bp, Artificial Sequence
  Description of Artificial Sequence: Synthetic polynucleotide
aatgatacggcgaccaccgagatctacactatagcctacactctttccctacacgacgctcttccgatctctgtcacctaagataaagcaaacagtacaat

SEQ ID NO: 2740 - DNA, 97 bp, Artificial Sequence
  Description of Artificial Sequence: Synthetic primer
aatgatacggcgaccaccgagatctacactatagcctacactctttccctacacgacgctcttccgatcttttggtttgtttttattttgcactggg

SEQ ID NO: 2741 - DNA, 97 bp, Artificial Sequence
  Description of Artificial Sequence: Synthetic primer
aatgatacggcgaccaccgagatctacactatagcctacactctttccctacacgacgctcttccgatctggcatcaattcaagaacacagagaaac

SEQ ID NO: 2742 - DNA, 99 bp, Artificial Sequence
  Description of Artificial Sequence: Synthetic primer
aatgatacggcgaccaccgagatctacactatagcctacactctttccctacacgacgctcttccgatctccctaaatgatgactttttcaaaaatgca

SEQ ID NO: 2743 - DNA, 93 bp, Artificial Sequence
  Description of Artificial Sequence: Synthetic primer
aatgatacggcgaccaccgagatctacactatagcctacactctttccctacacgacgctcttccgatctttgaaaggaagaagatgggctgc

SEQ ID NO: 2744 - DNA, 101 bp, Artificial Sequence
  Description of Artificial Sequence: Synthetic polynucleotide
aatgatacggcgaccaccgagatctacactatagcctacactctttccctacacgacgctcttccgatctttgcttgattgccatttcttcattattactg

SEQ ID NO: 2745 - DNA, 88 bp, Artificial Sequence
  Description of Artificial Sequence: Synthetic primer
aatgatacggcgaccaccgagatctacactatagcctacactctttccctacacgacgctcttccgatctggacacggtctgcaccct

SEQ ID NO: 2746 - DNA, 91 bp, Artificial Sequence
  Description of Artificial Sequence: Synthetic primer
aatgatacggcgaccaccgagatctacactatagcctacactctttccctacacgacgctcttccgatctctcaacagcgtgtctccgagc

SEQ ID NO: 2747 - DNA, 94 bp, Artificial Sequence
  Description of Artificial Sequence: Synthetic primer
aatgatacggcgaccaccgagatctacactatagcctacactctttccctacacgacgctcttccgatctccagagagtgcatgttttgctttt

SEQ ID NO: 2748 - DNA, 95 bp, Artificial Sequence
  Description of Artificial Sequence: Synthetic primer
aatgatacggcgaccaccgagatctacactatagcctacactctttccctacacgacgctcttccgatctattctgactggctaagtttcctgaa

SEQ ID NO: 2749 - DNA, 102 bp, Artificial Sequence
  Description of Artificial Sequence: Synthetic polynucleotide
aatgatacggcgaccaccgagatctacactatagcctacactctttccctacacgacgctcttccgatctcttcaaataaaatgaaagctggttagctttga

SEQ ID NO: 2750 - DNA, 92 bp, Artificial Sequence
  Description of Artificial Sequence: Synthetic primer
aatgatacggcgaccaccgagatctacactatagcctacactctttccctacacgacgctcttccgatctcagatggtcagtgccttgttgg

SEQ ID NO: 2751 - DNA, 95 bp, Artificial Sequence
  Description of Artificial Sequence: Synthetic primer
aatgatacggcgaccaccgagatctacactatagcctacactctttccctacacgacgctcttccgatctgagtcagcagggtttttcttgcttg

SEQ ID NO: 2752 - DNA, 97 bp, Artificial Sequence
  Description of Artificial Sequence: Synthetic primer
aatgatacggcgaccaccgagatctacactatagcctacactctttccctacacgacgctcttccgatcttttcatgtcttgtggaagattttctgt

SEQ ID NO: 2753 - DNA, 98 bp, Artificial Sequence
  Description of Artificial Sequence: Synthetic primer
aatgatacggcgaccaccgagatctacactatagcctacactctttccctacacgacgctcttccgatcttttgagcttctctctctcactctctctc

SEQ ID NO: 2754 - DNA, 96 bp, Artificial Sequence
  Description of Artificial Sequence: Synthetic primer
aatgatacggcgaccaccgagatctacactatagcctacactctttccctacacgacgctcttccgatctgtagtcctttctgtgtcttcccacct

SEQ ID NO: 2755 - DNA, 93 bp, Artificial Sequence
  Description of Artificial Sequence: Synthetic primer
aatgatacggcgaccaccgagatctacactatagcctacactctttccctacacgacgctcttccgatctcgaggttcctgaagctaaggcag

SEQ ID NO: 2756 - DNA, 99 bp, Artificial Sequence
  Description of Artificial Sequence: Synthetic primer
aatgatacggcgaccaccgagatctacactatagcctacactctttccctacacgacgctcttccgatctagaaaaagcccttagagatcatgctagaa

SEQ ID NO: 2757 - DNA, 96 bp, Artificial Sequence
  Description of Artificial Sequence: Synthetic primer
aatgatacggcgaccaccgagatctacactatagcctacactctttccctacacgacgctcttccgatctagggagttccaattctcacgtcaaag

SEQ ID NO: 2758 - DNA, 92 bp, Artificial Sequence
  Description of Artificial Sequence: Synthetic primer
aatgatacggcgaccaccgagatctacactatagcctacactctttccctacacgacgctcttccgatctcaactcaggaactcactgcctc

SEQ ID NO: 2759 - DNA, 95 bp, Artificial Sequence
  Description of Artificial Sequence: Synthetic primer
aatgatacggcgaccaccgagatctacactatagcctacactctttccctacacgacgctcttccgatctcctgaatacaggttatcagtgcctt

SEQ ID NO: 2760 - DNA, 101 bp, Artificial Sequence
  Description of Artificial Sequence: Synthetic polynucleotide
aatgatacggcgaccaccgagatctacactatagcctacactctttccctacacgacgctcttccgatcttaactacaaacaatcttccagaagtgacttg

SEQ ID NO: 2761 - DNA, 100 bp, Artificial Sequence
  Description of Artificial Sequence: Synthetic polynucleotide
aatgatacggcgaccaccgagatctacactatagcctacactctttccctacacgacgctcttccgatctctaaccaaagacctatttagttctcatgca

SEQ ID NO: 2762 - DNA, 100 bp, Artificial Sequence
  Description of Artificial Sequence: Synthetic polynucleotide
aatgatacggcgaccaccgagatctacactatagcctacactctttccctacacgacgctcttccgatctgctaataatgagaggaatggaaagatgcta

SEQ ID NO: 2763 - DNA, 96 bp, Artificial Sequence
  Description of Artificial Sequence: Synthetic primer
aatgatacggcgaccaccgagatctacactatagcctacactctttccctacacgacgctcttccgatctgttgacttctctaaggagcttcatga

SEQ ID NO: 2764 - DNA, 100 bp, Artificial Sequence
  Description of Artificial Sequence: Synthetic polynucleotide
aatgatacggcgaccaccgagatctacactatagcctacactctttccctacacgacgctcttccgatctgaagctcttttaacaacatttttatcggat

SEQ ID NO: 2765 - DNA, 100 bp, Artificial Sequence
  Description of Artificial Sequence: Synthetic polynucleotide
aatgatacggcgaccaccgagatctacactatagcctacactctttccctacacgacgctcttccgatctcagaacagtaaaacccagttattagacgtg

SEQ ID NO: 2766 - DNA, 95 bp, Artificial Sequence
  Description of Artificial Sequence: Synthetic primer
aatgatacggcgaccaccgagatctacactatagcctacactctttccctacacgacgctcttccgatctaaagtcctctcaagtaccctctgca

SEQ ID NO: 2767 - DNA, 96 bp, Artificial Sequence
  Description of Artificial Sequence: Synthetic primer
aatgatacggcgaccaccgagatctacactatagcctacactctttccctacacgacgctcttccgatctataaatgatagcactctccaagctgc

SEQ ID NO: 2768 - DNA, 90 bp, Artificial Sequence
  Description of Artificial Sequence: Synthetic primer
aatgatacggcgaccaccgagatctacactatagcctacactctttccctacacgacgctcttccgatctattcaggaggaagtgcgcct

SEQ ID NO: 2769 - DNA, 94 bp, Artificial Sequence
  Description of Artificial Sequence: Synthetic primer
aatgatacggcgaccaccgagatctacactatagcctacactctttccctacacgacgctcttccgatctcatacagggcaagattgcctcaaa

SEQ ID NO: 2770 - DNA, 100 bp, Artificial Sequence
  Description of Artificial Sequence: Synthetic polynucleotide
aatgatacggcgaccaccgagatctacactatagcctacactctttccctacacgacgctcttccgatctgtaatggctacacagaatcctaataatcag

SEQ ID NO: 2771 - DNA, 97 bp, Artificial Sequence
  Description of Artificial Sequence: Synthetic primer
aatgatacggcgaccaccgagatctacactatagcctacactctttccctacacgacgctcttccgatctccctttttccaagagaagaagcatatg

SEQ ID NO: 2772 - DNA, 103 bp, Artificial Sequence
  Description of Artificial Sequence: Synthetic polynucleotide
aatgatacggcgaccaccgagatctacactatagcctacactctttccctacacgacgctcttccgatctcttgattcaccttgacaataaaattatctatgc

SEQ ID NO: 2773 - DNA, 99 bp, Artificial Sequence
  Description of Artificial Sequence: Synthetic primer
aatgatacggcgaccaccgagatctacactatagcctacactctttccctacacgacgctcttccgatcttccaatagcataaaccaaaagatgatgat

SEQ ID NO: 2774 - DNA, 101 bp, Artificial Sequence
  Description of Artificial Sequence: Synthetic polynucleotide
aatgatacggcgaccaccgagatctacactatagcctacactctttccctacacgacgctcttccgatctcactcatcttattgtaaatacaaacttggct

SEQ ID NO: 2775 - DNA, 99 bp, Artificial Sequence
  Description of Artificial Sequence: Synthetic primer
aatgatacggcgaccaccgagatctacactatagcctacactctttccctacacgacgctcttccgatctttacaaaattaacaaggaaggcagaacgc

SEQ ID NO: 2776 - DNA, 94 bp, Artificial Sequence
  Description of Artificial Sequence: Synthetic primer
aatgatacggcgaccaccgagatctacactatagcctacactctttccctacacgacgctcttccgatctgatactgaggaaggcatggttcgt

SEQ ID NO: 2777 - DNA, 98 bp, Artificial Sequence
  Description of Artificial Sequence: Synthetic primer
aatgatacggcgaccaccgagatctacactatagcctacactctttccctacacgacgctcttccgatctgaccaacttttcccagtttctcaatgaa

SEQ ID NO: 2778 - DNA, 95 bp, Artificial Sequence
  Description of Artificial Sequence: Synthetic primer
aatgatacggcgaccaccgagatctacactatagcctacactctttccctacacgacgctcttccgatcttctcacaagacaaccaaggacaagg

SEQ ID NO: 2779 - DNA, 95 bp, Artificial Sequence
  Description of Artificial Sequence: Synthetic primer
aatgatacggcgaccaccgagatctacactatagcctacactctttccctacacgacgctcttccgatctaggagaggtattactggtgtggcaa

SEQ ID NO: 2780 - DNA, 93 bp, Artificial Sequence
  Description of Artificial Sequence: Synthetic primer
aatgatacggcgaccaccgagatctacactatagcctacactctttccctacacgacgctcttccgatctatttttgcagctcaagcccagga

SEQ ID NO: 2781 - DNA, 93 bp, Artificial Sequence
  Description of Artificial Sequence: Synthetic primer
aatgatacggcgaccaccgagatctacactatagcctacactctttccctacacgacgctcttccgatctttcctggaacattctgagcctca

SEQ ID NO: 2782 - DNA, 91 bp, Artificial Sequence
  Description of Artificial Sequence: Synthetic primer
aatgatacggcgaccaccgagatctacactatagcctacactctttccctacacgacgctcttccgatctagttggattccacccagccaa

SEQ ID NO: 2783 - DNA, 96 bp, Artificial Sequence
  Description of Artificial Sequence: Synthetic primer
aatgatacggcgaccaccgagatctacactatagcctacactctttccctacacgacgctcttccgatctgtatttgggcgaatgcagtttttcct

SEQ ID NO: 2784 - DNA, 91 bp, Artificial Sequence
  Description of Artificial Sequence: Synthetic primer
aatgatacggcgaccaccgagatctacactatagcctacactctttccctacacgacgctcttccgatctataagactctccacccagccc

SEQ ID NO: 2785 - DNA, 94 bp, Artificial Sequence
  Description of Artificial Sequence: Synthetic primer
aatgatacggcgaccaccgagatctacactatagcctacactctttccctacacgacgctcttccgatctttatagctgagtctccatcctggg

SEQ ID NO: 2786 - DNA, 90 bp, Artificial Sequence
  Description of Artificial Sequence: Synthetic primer
aatgatacggcgaccaccgagatctacactatagcctacactctttccctacacgacgctcttccgatctacaagctggctgggtcatgg

SEQ ID NO: 2787 - DNA, 102 bp, Artificial Sequence
  Description of Artificial Sequence: Synthetic polynucleotide
aatgatacggcgaccaccgagatctacactatagcctacactctttccctacacgacgctcttccgatctgggaaaaaaacccagagagaaagaacagtata

SEQ ID NO: 2788 - DNA, 100 bp, Artificial Sequence
  Description of Artificial Sequence: Synthetic polynucleotide
aatgatacggcgaccaccgagatctacactatagcctacactctttccctacacgacgctcttccgatcttttcagcttctatatccagctttcttttta

SEQ ID NO: 2789 - DNA, 91 bp, Artificial Sequence
  Description of Artificial Sequence: Synthetic primer
aatgatacggcgaccaccgagatctacactatagcctacactctttccctacacgacgctcttccgatctgccaaacccatgaaggagacc

SEQ ID NO: 2790 - DNA, 87 bp, Artificial Sequence
  Description of Artificial Sequence: Synthetic primer
aatgatacggcgaccaccgagatctacactatagcctacactctttccctacacgacgctcttccgatctatgcagccgccacacga

SEQ ID NO: 2791 - DNA, 98 bp, Artificial Sequence
  Description of Artificial Sequence: Synthetic primer
aatgatacggcgaccaccgagatctacactatagcctacactctttccctacacgacgctcttccgatctatgtaagaaatgtgatgttctgaaagct

SEQ ID NO: 2792 - DNA, 90 bp, Artificial Sequence
  Description of Artificial Sequence: Synthetic primer
aatgatacggcgaccaccgagatctacactatagcctacactctttccctacacgacgctcttccgatctcatcggagccgggcagttac

SEQ ID NO: 2793 - DNA, 94 bp, Artificial Sequence
  Description of Artificial Sequence: Synthetic primer
aatgatacggcgaccaccgagatctacactatagcctacactctttccctacacgacgctcttccgatctcagagaagagagagcatagtgctg

SEQ ID NO: 2794 - DNA, 92 bp, Artificial Sequence
  Description of Artificial Sequence: Synthetic primer
aatgatacggcgaccaccgagatctacactatagcctacactctttccctacacgacgctcttccgatctatctttcaacaggcagcgcacc

SEQ ID NO: 2795 - DNA, 99 bp, Artificial Sequence
  Description of Artificial Sequence: Synthetic primer
aatgatacggcgaccaccgagatctacactatagcctacactctttccctacacgacgctcttccgatctagacaaatcccaaaacaaacctgaaaagt

SEQ ID NO: 2796 - DNA, 89 bp, Artificial Sequence
  Description of Artificial Sequence: Synthetic primer
aatgatacggcgaccaccgagatctacactatagcctacactctttccctacacgacgctcttccgatctcctgtagtctcccgagcgg

SEQ ID NO: 2797 - DNA, 92 bp, Artificial Sequence
  Description of Artificial Sequence: Synthetic primer
aatgatacggcgaccaccgagatctacactatagcctacactctttccctacacgacgctcttccgatcttgcctcatggttgcccatcttc

SEQ ID NO: 2798 - DNA, 92 bp, Artificial Sequence
  Description of Artificial Sequence: Synthetic primer
aatgatacggcgaccaccgagatctacactatagcctacactctttccctacacgacgctcttccgatctccaggaagtgctgcccaaatgg

SEQ ID NO: 2799 - DNA, 91 bp, Artificial Sequence
  Description of Artificial Sequence: Synthetic primer
aatgatacggcgaccaccgagatctacactatagcctacactctttccctacacgacgctcttccgatctccactcgggtcatggccttca

SEQ ID NO: 2800 - DNA, 89 bp, Artificial Sequence
  Description of Artificial Sequence: Synthetic primer
aatgatacggcgaccaccgagatctacactatagcctacactctttccctacacgacgctcttccgatctccctgagcgtcatctgccc

SEQ ID NO: 2801 - DNA, 90 bp, Artificial Sequence
  Description of Artificial Sequence: Synthetic primer
aatgatacggcgaccaccgagatctacactatagcctacactctttccctacacgacgctcttccgatctgcctgagccgggtctcttgt

SEQ ID NO: 2802 - DNA, 94 bp, Artificial Sequence
  Description of Artificial Sequence: Synthetic primer
aatgatacggcgaccaccgagatctacactatagcctacactctttccctacacgacgctcttccgatctgcctatcgctctgctctctctttg

SEQ ID NO: 2803 - DNA, 89 bp, Artificial Sequence
  Description of Artificial Sequence: Synthetic primer
aatgatacggcgaccaccgagatctacactatagcctacactctttccctacacgacgctcttccgatctggcctcaacgcccatgtct

SEQ ID NO: 2804 - DNA, 88 bp, Artificial Sequence
  Description of Artificial Sequence: Synthetic primer
aatgatacggcgaccaccgagatctacactatagcctacactctttccctacacgacgctcttccgatctgctgtacctccacgccct

SEQ ID NO: 2805 - DNA, 89 bp, Artificial Sequence
  Description of Artificial Sequence: Synthetic primer
aatgatacggcgaccaccgagatctacactatagcctacactctttccctacacgacgctcttccgatctccctctgcctccactgcca

SEQ ID NO: 2806 - DNA, 89 bp, Artificial Sequence
  Description of Artificial Sequence: Synthetic primer
aatgatacggcgaccaccgagatctacactatagcctacactctttccctacacgacgctcttccgatcttcccagaaggtgggcaggg

SEQ ID NO: 2807 - DNA, 89 bp, Artificial Sequence
  Description of Artificial Sequence: Synthetic primer
aatgatacggcgaccaccgagatctacactatagcctacactctttccctacacgacgctcttccgatctctggcagcccgtctgagga

SEQ ID NO: 2808 - DNA, 93 bp, Artificial Sequence
  Description of Artificial Sequence: Synthetic primer
aatgatacggcgaccaccgagatctacactatagcctacactctttccctacacgacgctcttccgatctacaagaagacgaccaacgtgagc

SEQ ID NO: 2809 - DNA, 89 bp, Artificial Sequence
  Description of Artificial Sequence: Synthetic primer
aatgatacggcgaccaccgagatctacactatagcctacactctttccctacacgacgctcttccgatctttcagccctgcctcccacc

SEQ ID NO: 2810 - DNA, 91 bp, Artificial Sequence
  Description of Artificial Sequence: Synthetic primer
aatgatacggcgaccaccgagatctacactatagcctacactctttccctacacgacgctcttccgatctaggtgtctgtcctgggagtct

SEQ ID NO: 2811 - DNA, 89 bp, Artificial Sequence; identical to SEQ ID NO: 2809
  Description of Artificial Sequence: Synthetic primer

SEQ ID NO: 2812 - DNA, 91 bp, Artificial Sequence
  Description of Artificial Sequence: Synthetic primer
aatgatacggcgaccaccgagatctacactatagcctacactctttccctacacgacgctcttccgatcttgggagtctcaggacagcctg

SEQ ID NO: 2813 - DNA, 89 bp, Artificial Sequence
  Description of Artificial Sequence: Synthetic primer
aatgatacggcgaccaccgagatctacactatagcctacactctttccctacacgacgctcttccgatctcacagcctgggcacagagg

SEQ ID NO: 2814 - DNA, 90 bp, Artificial Sequence
  Description of Artificial Sequence: Synthetic primer
aatgatacggcgaccaccgagatctacactatagcctacactctttccctacacgacgctcttccgatcttgggaagtccagcttgggtc

SEQ ID NO: 2815 - DNA, 88 bp, Artificial Sequence
  Description of Artificial Sequence: Synthetic primer
aatgatacggcgaccaccgagatctacactatagcctacactctttccctacacgacgctcttccgatctacctctgccctctgccca

SEQ ID NO: 2816 - DNA, 91 bp, Artificial Sequence
  Description of Artificial Sequence: Synthetic primer
aatgatacggcgaccaccgagatctacactatagcctacactctttccctacacgacgctcttccgatcttgtgtgggaacacacggtcat

SEQ ID NO: 2817 - DNA, 91 bp, Artificial Sequence
  Description of Artificial Sequence: Synthetic primer
aatgatacggcgaccaccgagatctacactatagcctacactctttccctacacgacgctcttccgatctcccggacactctctctgcctg

SEQ ID NO: 2818 - DNA, 89 bp, Artificial Sequence
  Description of Artificial Sequence: Synthetic primer
aatgatacggcgaccaccgagatctacactatagcctacactctttccctacacgacgctcttccgatcttgactgtctcgcccggtcc

SEQ ID NO: 2819 - DNA, 96 bp, Artificial Sequence
  Description of Artificial Sequence: Synthetic primer
aatgatacggcgaccaccgagatctacactatagcctacactctttccctacacgacgctcttccgatctagacatcaatagctcagaggtggagg

SEQ ID NO: 2820 - DNA, 93 bp, Artificial Sequence
  Description of Artificial Sequence: Synthetic primer
aatgatacggcgaccaccgagatctacactatagcctacactctttccctacacgacgctcttccgatctctgtctgtgtgtgtccatgtgcg

SEQ ID NO: 2821 - DNA, 91 bp, Artificial Sequence
  Description of Artificial Sequence: Synthetic primer
aatgatacggcgaccaccgagatctacactatagcctacactctttccctacacgacgctcttccgatcttccggcaagtcaagctcatcc

SEQ ID NO: 2822 - DNA, 93 bp, Artificial Sequence; identical to SEQ ID NO: 2820
  Description of Artificial Sequence: Synthetic primer

SEQ ID NO: 2823 - DNA, 88 bp, Artificial Sequence
  Description of Artificial Sequence: Synthetic primer
aatgatacggcgaccaccgagatctacactatagcctacactctttccctacacgacgctcttccgatctggtgcgctgagctgtgtg

SEQ ID NO: 2824 - DNA, 90 bp, Artificial Sequence
  Description of Artificial Sequence: Synthetic primer
aatgatacggcgaccaccgagatctacactatagcctacactctttccctacacgacgctcttccgatcttggagggcagcctcttcacc

SEQ ID NO: 2825 - DNA, 91 bp, Artificial Sequence
  Description of Artificial Sequence: Synthetic primer
aatgatacggcgaccaccgagatctacactatagcctacactctttccctacacgacgctcttccgatctggaaacctgcgggagttcctg

SEQ ID NO: 2826 - DNA, 91 bp, Artificial Sequence
  Description of Artificial Sequence: Synthetic primer
aatgatacggcgaccaccgagatctacactatagcctacactctttccctacacgacgctcttccgatctcaggtgtcctgaggcacccaa

SEQ ID NO: 2827 - DNA, 90 bp, Artificial Sequence
  Description of Artificial Sequence: Synthetic primer
aatgatacggcgaccaccgagatctacactatagcctacactctttccctacacgacgctcttccgatctagctgtggtgggtcatgtct

SEQ ID NO: 2828 - DNA, 90 bp, Artificial Sequence
  Description of Artificial Sequence: Synthetic primer
aatgatacggcgaccaccgagatctacactatagcctacactctttccctacacgacgctcttccgatcttctgcactgaggccctctct

SEQ ID NO: 2829 - DNA, 90 bp, Artificial Sequence
  Description of Artificial Sequence: Synthetic primer
aatgatacggcgaccaccgagatctacactatagcctacactctttccctacacgacgctcttccgatctctggccctacctccaggtgg

SEQ ID NO: 2830 - DNA, 90 bp, Artificial Sequence
  Description of Artificial Sequence: Synthetic primer
aatgatacggcgaccaccgagatctacactatagcctacactctttccctacacgacgctcttccgatctgcctgaggctccctgtgacc

SEQ ID NO: 2831 - DNA, 89 bp, Artificial Sequence
  Description of Artificial Sequence: Synthetic primer
aatgatacggcgaccaccgagatctacactatagcctacactctttccctacacgacgctcttccgatctagtacctcgacctccgcct

SEQ ID NO: 2832 - DNA, 92 bp, Artificial Sequence
  Description of Artificial Sequence: Synthetic primer
aatgatacggcgaccaccgagatctacactatagcctacactctttccctacacgacgctcttccgatctctgtgggtgagggttacagctg

SEQ ID NO: 2833 - DNA, 91 bp, Artificial Sequence
  Description of Artificial Sequence: Synthetic primer
aatgatacggcgaccaccgagatctacactatagcctacactctttccctacacgacgctcttccgatcttggttggaggtcaaggccacg

SEQ ID NO: 2834 - DNA, 92 bp, Artificial Sequence; identical to SEQ ID NO: 2832
  Description of Artificial Sequence: Synthetic primer

SEQ ID NO: 2835 - DNA, 90 bp, Artificial Sequence
  Description of Artificial Sequence: Synthetic primer
aatgatacggcgaccaccgagatctacactatagcctacactctttccctacacgacgctcttccgatctatgtacctgcggcaggactg

SEQ ID NO: 2836 - DNA, 92 bp, Artificial Sequence
  Description of Artificial Sequence: Synthetic primer
aatgatacggcgaccaccgagatctacactatagcctacactctttccctacacgacgctcttccgatctgggcagaaagaggactcctcag

SEQ ID NO: 2837 - DNA, 89 bp, Artificial Sequence
  Description of Artificial Sequence: Synthetic primer
aatgatacggcgaccaccgagatctacactatagcctacactctttccctacacgacgctcttccgatctagctctggctctggcacgg

SEQ ID NO: 2838 - DNA, 97 bp, Artificial Sequence
  Description of Artificial Sequence: Synthetic primer
aatgatacggcgaccaccgagatctacactatagcctacactctttccctacacgacgctcttccgatctgaacagatcagcctttcaacatctgga

SEQ ID NO: 2839 - DNA, 89 bp, Artificial Sequence; identical to SEQ ID NO: 2837
  Description of Artificial Sequence: Synthetic primer

SEQ ID NO: 2840 - DNA, 92 bp, Artificial Sequence
  Description of Artificial Sequence: Synthetic primer
aatgatacggcgaccaccgagatctacactatagcctacactctttccctacacgacgctcttccgatctgccacagggtgttagagcttct

SEQ ID NO: 2841 - DNA, 94 bp, Artificial Sequence
  Description of Artificial Sequence: Synthetic primer
aatgatacggcgaccaccgagatctacactatagcctacactctttccctacacgacgctcttccgatctctcagatgaaaccaccagcacagg

SEQ ID NO: 2842 - DNA, 95 bp, Artificial Sequence
  Description of Artificial Sequence: Synthetic primer
aatgatacggcgaccaccgagatctacactatagcctacactctttccctacacgacgctcttccgatctgtgctagaagctctctatcccacac

SEQ ID NO: 2843 - DNA, 93 bp, Artificial Sequence
  Description of Artificial Sequence: Synthetic primer
aatgatacggcgaccaccgagatctacactatagcctacactctttccctacacgacgctcttccgatctcggcactcacgttggttgtcttt

SEQ ID NO: 2844 - DNA, 89 bp, Artificial Sequence
  Description of Artificial Sequence: Synthetic primer
aatgatacggcgaccaccgagatctacactatagcctacactctttccctacacgacgctcttccgatcttcccaccctggcattaccc

SEQ ID NO: 2845 - DNA, 88 bp, Artificial Sequence
  Description of Artificial Sequence: Synthetic primer
aatgatacggcgaccaccgagatctacactatagcctacactctttccctacacgacgctcttccgatcttgggcagggaaagccagt

SEQ ID NO: 2846 - DNA, 94 bp, Artificial Sequence
  Description of Artificial Sequence: Synthetic primer
aatgatacggcgaccaccgagatctacactatagcctacactctttccctacacgacgctcttccgatcttgtttgcttggaatgggacaagat

SEQ ID NO: 2847 - DNA, 94 bp, Artificial Sequence
  Description of Artificial Sequence: Synthetic primer
aatgatacggcgaccaccgagatctacactatagcctacactctttccctacacgacgctcttccgatctaatagcaagcaaggaatgccttca

SEQ ID NO: 2848 - DNA, 92 bp, Artificial Sequence
  Description of Artificial Sequence: Synthetic primer
aatgatacggcgaccaccgagatctacactatagcctacactctttccctacacgacgctcttccgatctgagagagaggtggtgctgagtg

SEQ ID NO: 2849 - DNA, 96 bp, Artificial Sequence
  Description of Artificial Sequence: Synthetic primer
aatgatacggcgaccaccgagatctacactatagcctacactctttccctacacgacgctcttccgatctcatcgagaggagaagttacagtgtgt

SEQ ID NO: 2850 - DNA, 91 bp, Artificial Sequence
  Description of Artificial Sequence: Synthetic primer
aatgatacggcgaccaccgagatctacactatagcctacactctttccctacacgacgctcttccgatctcttcccagtagactggcccac

SEQ ID NO: 2851 - DNA, 92 bp, Artificial Sequence
  Description of Artificial Sequence: Synthetic primer
aatgatacggcgaccaccgagatctacactatagcctacactctttccctacacgacgctcttccgatcttcattcctcctgctgcctctgc

SEQ ID NO: 2852 - DNA, 97 bp, Artificial Sequence
  Description of Artificial Sequence: Synthetic primer
aatgatacggcgaccaccgagatctacactatagcctacactctttccctacacgacgctcttccgatctgttcccattactctaactttcgcatgc

SEQ ID NO: 2853 - DNA, 92 bp, Artificial Sequence
  Description of Artificial Sequence: Synthetic primer
aatgatacggcgaccaccgagatctacactatagcctacactctttccctacacgacgctcttccgatctccatgtgccctcctcttcctcc

SEQ ID NO: 2854 - DNA, 90 bp, Artificial Sequence
  Description of Artificial Sequence: Synthetic primer
aatgatacggcgaccaccgagatctacactatagcctacactctttccctacacgacgctcttccgatctcaagggcagggcttggctac

SEQ ID NO: 2855 - DNA, 88 bp, Artificial Sequence
  Description of Artificial Sequence: Synthetic primer
aatgatacggcgaccaccgagatctacactatagcctacactctttccctacacgacgctcttccgatcttctgcacatcgtcccgca

SEQ ID NO: 2856 - DNA, 98 bp, Artificial Sequence
  Description of Artificial Sequence: Synthetic primer
aatgatacggcgaccaccgagatctacactatagcctacactctttccctacacgacgctcttccgatcttttggctttgaaatggaactgaaaactt

SEQ ID NO: 2857 - DNA, 90 bp, Artificial Sequence
  Description of Artificial Sequence: Synthetic primer
aatgatacggcgaccaccgagatctacactatagcctacactctttccctacacgacgctcttccgatctcaaggcccaggagtccaggc

SEQ ID NO: 2858 - DNA, 96 bp, Artificial Sequence
  Description of Artificial Sequence: Synthetic primer
aatgatacggcgaccaccgagatctacactatagcctacactctttccctacacgacgctcttccgatctgcacatctcagtttcccactcatcag

SEQ ID NO: 2859 - DNA, 97 bp, Artificial Sequence
  Description of Artificial Sequence: Synthetic primer
aatgatacggcgaccaccgagatctacactatagcctacactctttccctacacgacgctcttccgatctggtggagggatgaagtccttaaaacta

SEQ ID NO: 2860 - DNA, 103 bp, Artificial Sequence
  Description of Artificial Sequence: Synthetic polynucleotide
aatgatacggcgaccaccgagatctacactatagcctacactctttccctacacgacgctcttccgatctgcaacaagtgttttaatttaccaatttcctttg

SEQ ID NO: 2861 - DNA, 99 bp, Artificial Sequence
  Description of Artificial Sequence: Synthetic primer
aatgatacggcgaccaccgagatctacactatagcctacactctttccctacacgacgctcttccgatctagacagactgtacctttctgatttcaacc

SEQ ID NO: 2862 - DNA, 88 bp, Artificial Sequence
  Description of Artificial Sequence: Synthetic primer
aatgatacggcgaccaccgagatctacactatagcctacactctttccctacacgacgctcttccgatctaggagccaagggaggcca

SEQ ID NO: 2863 - DNA, 101 bp, Artificial Sequence
  Description of Artificial Sequence: Synthetic polynucleotide
aatgatacggcgaccaccgagatctacactatagcctacactctttccctacacgacgctcttccgatctgtataaaaataagtaggaaatagcagcctca

SEQ ID NO: 2864 - DNA, 101 bp, Artificial Sequence
  Description of Artificial Sequence: Synthetic polynucleotide
aatgatacggcgaccaccgagatctacactatagcctacactctttccctacacgacgctcttccgatctggcagactttaagggatacaagttaaaataa

SEQ ID NO: 2865 - DNA, 100 bp, Artificial Sequence
  Description of Artificial Sequence: Synthetic polynucleotide
aatgatacggcgaccaccgagatctacactatagcctacactctttccctacacgacgctcttccgatctagctaacataaaacttttgcattcatttcc

SEQ ID NO: 2866 - DNA, 100 bp, Artificial Sequence
  Description of Artificial Sequence: Synthetic polynucleotide
aatgatacggcgaccaccgagatctacactatagcctacactctttccctacacgacgctcttccgatctcactttgcctacgttctatgatgtgtaatt

SEQ ID NO: 2867 - DNA, 95 bp, Artificial Sequence
  Description of Artificial Sequence: Synthetic primer
aatgatacggcgaccaccgagatctacactatagcctacactctttccctacacgacgctcttccgatctaggtgattttcgtggaagtgggtta

SEQ ID NO: 2868 - DNA, 96 bp, Artificial Sequence
  Description of Artificial Sequence: Synthetic primer
aatgatacggcgaccaccgagatctacactatagcctacactctttccctacacgacgctcttccgatctttttgtgcatctttgttgctgtcctt

SEQ ID NO: 2869 - DNA, 99 bp, Artificial Sequence
  Description of Artificial Sequence: Synthetic primer
aatgatacggcgaccaccgagatctacactatagcctacactctttccctacacgacgctcttccgatctcttggaaactcccatttgagatcatattc

SEQ ID NO: 2870 - DNA, 96 bp, Artificial Sequence; identical to SEQ ID NO: 2868
  Description of Artificial Sequence: Synthetic primer

SEQ ID NO: 2871 - DNA, 102 bp, Artificial Sequence
  Description of Artificial Sequence: Synthetic polynucleotide
aatgatacggcgaccaccgagatctacactatagcctacactctttccctacacgacgctcttccgatcttcagagatgaaatgatgagtcagttaggaata

SEQ ID NO: 2872 - DNA, 94 bp, Artificial Sequence
  Description of Artificial Sequence: Synthetic primer
aatgatacggcgaccaccgagatctacactatagcctacactctttccctacacgacgctcttccgatcttccaatggaaaagaaatgctgcag

SEQ ID NO: 2873 - DNA, 101 bp, Artificial Sequence
  Description of Artificial Sequence: Synthetic polynucleotide
aatgatacggcgaccaccgagatctacactatagcctacactctttccctacacgacgctcttccgatcttacctttttgtacttgtgacaaattagcagg

SEQ ID NO: 2874 - DNA, 97 bp, Artificial Sequence
  Description of Artificial Sequence: Synthetic primer
aatgatacggcgaccaccgagatctacactatagcctacactctttccctacacgacgctcttccgatctttcctgatggtggaatatcacaagaac

SEQ ID NO: 2875 - DNA, 102 bp, Artificial Sequence
  Description of Artificial Sequence: Synthetic polynucleotide
aatgatacggcgaccaccgagatctacactatagcctacactctttccctacacgacgctcttccgatctatgaaagagtcaataggtcagagagttttatg

SEQ ID NO: 2876 - DNA, 101 bp, Artificial Sequence
  Description of Artificial Sequence: Synthetic polynucleotide
aatgatacggcgaccaccgagatctacactatagcctacactctttccctacacgacgctcttccgatctaagccattacttaacttttcctagttaagac

SEQ ID NO: 2877 - DNA, 102 bp, Artificial Sequence
  Description of Artificial Sequence: Synthetic polynucleotide
aatgatacggcgaccaccgagatctacactatagcctacactctttccctacacgacgctcttccgatctaagcaaggagaattatgctaaaaatggtatct

SEQ ID NO: 2878 - DNA, 94 bp, Artificial Sequence
  Description of Artificial Sequence: Synthetic primer
aatgatacggcgaccaccgagatctacactatagcctacactctttccctacacgacgctcttccgatctaaagattgtgtgagcagcctgcat

SEQ ID NO: 2879 - DNA, 90 bp, Artificial Sequence
  Description of Artificial Sequence: Synthetic primer
aatgatacggcgaccaccgagatctacactatagcctacactctttccctacacgacgctcttccgatctattcccaggtgagcccgaat

SEQ ID NO: 2880 - DNA, 95 bp, Artificial Sequence
  Description of Artificial Sequence: Synthetic primer
aatgatacggcgaccaccgagatctacactatagcctacactctttccctacacgacgctcttccgatctggtcactgaaaatgaaagtgcatga

SEQ ID NO: 2881 - DNA, 99 bp, Artificial Sequence
  Description of Artificial Sequence: Synthetic primer
aatgatacggcgaccaccgagatctacactatagcctacactctttccctacacgacgctcttccgatctggaaattatgagaatagcagctaccatgg

SEQ ID NO: 2882 - DNA, 98 bp, Artificial Sequence
  Description of Artificial Sequence: Synthetic primer
aatgatacggcgaccaccgagatctacactatagcctacactctttccctacacgacgctcttccgatctgggttctaaaccactcctttgaaatatt

SEQ ID NO: 2883 - DNA, 101 bp, Artificial Sequence
  Description of Artificial Sequence: Synthetic polynucleotide
aatgatacggcgaccaccgagatctacactatagcctacactctttccctacacgacgctcttccgatctccacattttatgtcaagaaggtattcctcca

SEQ ID NO: 2884 - DNA, 102 bp, Artificial Sequence
  Description of Artificial Sequence: Synthetic polynucleotide
aatgatacggcgaccaccgagatctacactatagcctacactctttccctacacgacgctcttccgatctgcttcaataacttacaaattacgttctctaga

SEQ ID NO: 2885 - DNA, 90 bp, Artificial Sequence
  Description of Artificial Sequence: Synthetic primer
aatgatacggcgaccaccgagatctacactatagcctacactctttccctacacgacgctcttccgatctgcaatggaaggagcgagcgc

SEQ ID NO: 2886 - DNA, 89 bp, Artificial Sequence
  Description of Artificial Sequence: Synthetic primer
aatgatacggcgaccaccgagatctacactatagcctacactctttccctacacgacgctcttccgatcttcggagccactctctgcag

SEQ ID NO: 2887 - DNA, 90 bp, Artificial Sequence
  Description of Artificial Sequence: Synthetic primer
aatgatacggcgaccaccgagatctacactatagcctacactctttccctacacgacgctcttccgatctagcgtctgcacgctctcaag

SEQ ID NO: 2888 - DNA, 95 bp, Artificial Sequence
  Description of Artificial Sequence: Synthetic primer
aatgatacggcgaccaccgagatctacactatagcctacactctttccctacacgacgctcttccgatctcaaacttattttgagaggccgccac

SEQ ID NO: 2889 - DNA, 90 bp, Artificial Sequence
  Description of Artificial Sequence: Synthetic primer
aatgatacggcgaccaccgagatctacactatagcctacactctttccctacacgacgctcttccgatctcttgctccaggaggcccagg

SEQ ID NO: 2890 - DNA, 88 bp, Artificial Sequence
  Description of Artificial Sequence: Synthetic primer
aatgatacggcgaccaccgagatctacactatagcctacactctttccctacacgacgctcttccgatctagcctcagcggataccgc

SEQ ID NO: 2891 - DNA, 92 bp, Artificial Sequence
  Description of Artificial Sequence: Synthetic primer
aatgatacggcgaccaccgagatctacactatagcctacactctttccctacacgacgctcttccgatctgctggtttcagcatcggcgaaa

SEQ ID NO: 2892 - DNA, 89 bp, Artificial Sequence
  Description of Artificial Sequence: Synthetic primer
aatgatacggcgaccaccgagatctacactatagcctacactctttccctacacgacgctcttccgatcttcccgcagctcctgctctg

SEQ ID NO: 2893 - DNA, 92 bp, Artificial Sequence
  Description of Artificial Sequence: Synthetic primer
aatgatacggcgaccaccgagatctacactatagcctacactctttccctacacgacgctcttccgatctagcgtgaggccaacaaaaagat

SEQ ID NO: 2894 - DNA, 100 bp, Artificial Sequence
  Description of Artificial Sequence: Synthetic polynucleotide
aatgatacggcgaccaccgagatctacactatagcctacactctttccctacacgacgctcttccgatctgttaaaatgcctccttcataacctgagact

SEQ ID NO: 2895 - DNA, 98 bp, Artificial Sequence
  Description of Artificial Sequence: Synthetic primer
aatgatacggcgaccaccgagatctacactatagcctacactctttccctacacgacgctcttccgatctagattaggtgagctttcaatctctcttt

SEQ ID NO: 2896 - DNA, 101 bp, Artificial Sequence
  Description of Artificial Sequence: Synthetic polynucleotide
aatgatacggcgaccaccgagatctacactatagcctacactctttccctacacgacgctcttccgatctactcctaactgacatggtgcaatatgatttt

SEQ ID NO: 2897 - DNA, 95 bp, Artificial Sequence
  Description of Artificial Sequence: Synthetic primer
aatgatacggcgaccaccgagatctacactatagcctacactctttccctacacgacgctcttccgatctccagttcagagtggactacatcctg

SEQ ID NO: 2898 - DNA, 101 bp, Artificial Sequence
  Description of Artificial Sequence: Synthetic polynucleotide
aatgatacggcgaccaccgagatctacactatagcctacactctttccctacacgacgctcttccgatctcttgcctttctctaaactttcttgtgttcac

SEQ ID NO: 2899 - DNA, 91 bp, Artificial Sequence
  Description of Artificial Sequence: Synthetic primer
aatgatacggcgaccaccgagatctacactatagcctacactctttccctacacgacgctcttccgatcttggcaaattgatgtgagcgct

SEQ ID NO: 2900 - DNA, 89 bp, Artificial Sequence
  Description of Artificial Sequence: Synthetic primer
aatgatacggcgaccaccgagatctacactatagcctacactctttccctacacgacgctcttccgatctcgctgccgtgtcctgactt

SEQ ID NO: 2901 - DNA, 91 bp, Artificial Sequence; identical to SEQ ID NO: 2899
  Description of Artificial Sequence: Synthetic primer

SEQ ID NO: 2902 - DNA, 90 bp, Artificial Sequence
  Description of Artificial Sequence: Synthetic primer
aatgatacggcgaccaccgagatctacactatagcctacactctttccctacacgacgctcttccgatctcccaccagcatgtttgacgt

SEQ ID NO: 2903 - DNA, 91 bp, Artificial Sequence
  Description of Artificial Sequence: Synthetic primer
aatgatacggcgaccaccgagatctacactatagcctacactctttccctacacgacgctcttccgatctcgcttctcccaagcattcaca

SEQ ID NO: 2904 - DNA, 92 bp, Artificial Sequence
  Description of Artificial Sequence: Synthetic primer
aatgatacggcgaccaccgagatctacactatagcctacactctttccctacacgacgctcttccgatcttttcggttggctttggtgagat

SEQ ID NO: 2905 - DNA, 98 bp, Artificial Sequence
  Description of Artificial Sequence: Synthetic primer
aatgatacggcgaccaccgagatctacactatagcctacactctttccctacacgacgctcttccgatctccctggtctgcactgtttatagagaaga

SEQ ID NO: 2906 - DNA, 92 bp, Artificial Sequence; identical to SEQ ID NO: 2904
  Description of Artificial Sequence: Synthetic primer

SEQ ID NO: 2907 - DNA, 90 bp, Artificial Sequence
  Description of Artificial Sequence: Synthetic primer
aatgatacggcgaccaccgagatctacactatagcctacactctttccctacacgacgctcttccgatctatccgggaggacaaccagac

SEQ ID NO: 2908 - DNA, 100 bp, Artificial Sequence
  Description of Artificial Sequence: Synthetic polynucleotide
aatgatacggcgaccaccgagatctacactatagcctacactctttccctacacgacgctcttccgatctatggaaaaatcagggttttgaagacttcag

SEQ ID NO: 2909 - DNA, 88 bp, Artificial Sequence
  Description of Artificial Sequence: Synthetic primer
aatgatacggcgaccaccgagatctacactatagcctacactctttccctacacgacgctcttccgatctggttcctggcgagggtgt

SEQ ID NO: 2910 - DNA, 91 bp, Artificial Sequence; identical to SEQ ID NO: 2903
  Description of Artificial Sequence: Synthetic primer

SEQ ID NO: 2911 - DNA, 89 bp, Artificial Sequence
  Description of Artificial Sequence: Synthetic primer
aatgatacggcgaccaccgagatctacactatagcctacactctttccctacacgacgctcttccgatctagctactcccgagcccgga

SEQ ID NO: 2912 - DNA, 90 bp, Artificial Sequence
  Description of Artificial Sequence: Synthetic primer
aatgatacggcgaccaccgagatctacactatagcctacactctttccctacacgacgctcttccgatctgtttgtgcccgcagaggatc

SEQ ID NO: 2913 - DNA, 94 bp, Artificial Sequence
  Description of Artificial Sequence: Synthetic primer
aatgatacggcgaccaccgagatctacactatagcctacactctttccctacacgacgctcttccgatcttcttcaatagcccaccagggaagg

SEQ ID NO: 2914 - DNA, 94 bp, Artificial Sequence
  Description of Artificial Sequence: Synthetic primer
aatgatacggcgaccaccgagatctacactatagcctacactctttccctacacgacgctcttccgatctagctgtggtatgagtgctgactta

SEQ ID NO: 2915 - DNA, 102 bp, Artificial Sequence
  Description of Artificial Sequence: Synthetic polynucleotide
aatgatacggcgaccaccgagatctacactatagcctacactctttccctacacgacgctcttccgatctaaatgataatccattgcctgtctaaagaacac

SEQ ID NO: 2916 - DNA, 100 bp, Artificial Sequence
  Description of Artificial Sequence: Synthetic polynucleotide
aatgatacggcgaccaccgagatctacactatagcctacactctttccctacacgacgctcttccgatctataaaagctgggaaataggtttcatggact

SEQ ID NO: 2917 - DNA, 102 bp, Artificial Sequence
  Description of Artificial Sequence: Synthetic polynucleotide
aatgatacggcgaccaccgagatctacactatagcctacactctttccctacacgacgctcttccgatctcctccacatggaagtaaagagaaaaatccata

SEQ ID NO: 2918 - DNA, 93 bp, Artificial Sequence
  Description of Artificial Sequence: Synthetic primer
aatgatacggcgaccaccgagatctacactatagcctacactctttccctacacgacgctcttccgatctactgctccaatgaagagtcgcac

SEQ ID NO: 2919 - DNA, 88 bp, Artificial Sequence
  Description of Artificial Sequence: Synthetic primer
aatgatacggcgaccaccgagatctacactatagcctacactctttccctacacgacgctcttccgatctagggccaaggatggtggg

SEQ ID NO: 2920 - DNA, 89 bp, Artificial Sequence
  Description of Artificial Sequence: Synthetic primer
aatgatacggcgaccaccgagatctacactatagcctacactctttccctacacgacgctcttccgatctcaggcaaacgcaacccacg

SEQ ID NO: 2921 - DNA, 90 bp, Artificial Sequence
  Description of Artificial Sequence: Synthetic primer
aatgatacggcgaccaccgagatctacactatagcctacactctttccctacacgacgctcttccgatctcgaggacgagacggacgacg

SEQ ID NO: 2922 - DNA, 90 bp, Artificial Sequence
  Description of Artificial Sequence: Synthetic primer
aatgatacggcgaccaccgagatctacactatagcctacactctttccctacacgacgctcttccgatctcagcccttgctgagcagatc

SEQ ID NO: 2923 - DNA, 90 bp, Artificial Sequence
  Description of Artificial Sequence: Synthetic primer
aatgatacggcgaccaccgagatctacactatagcctacactctttccctacacgacgctcttccgatctccactcacggctttctgtgc

SEQ ID NO: 2924 - DNA, 93 bp, Artificial Sequence
  Description of Artificial Sequence: Synthetic primer
aatgatacggcgaccaccgagatctacactatagcctacactctttccctacacgacgctcttccgatcttggaggctcatgggtggctattt

SEQ ID NO: 2925 - DNA, 94 bp, Artificial Sequence
  Description of Artificial Sequence: Synthetic primer
aatgatacggcgaccaccgagatctacactatagcctacactctttccctacacgacgctcttccgatctgtctacaactggtttgccaaccgg

SEQ ID NO: 2926 - DNA, 91 bp, Artificial Sequence
  Description of Artificial Sequence: Synthetic primer
aatgatacggcgaccaccgagatctacactatagcctacactctttccctacacgacgctcttccgatctggcaggacactgcttccctct

SEQ ID NO: 2927 - DNA, 90 bp, Artificial Sequence
  Description of Artificial Sequence: Synthetic primer
aatgatacggcgaccaccgagatctacactatagcctacactctttccctacacgacgctcttccgatctcagcaccctgacagcactgc

SEQ ID NO: 2928 - DNA, 89 bp, Artificial Sequence
  Description of Artificial Sequence: Synthetic primer
aatgatacggcgaccaccgagatctacactatagcctacactctttccctacacgacgctcttccgatctttgggaggtcttgggcagg

SEQ ID NO: 2929 - DNA, 88 bp, Artificial Sequence
  Description of Artificial Sequence: Synthetic primer
aatgatacggcgaccaccgagatctacactatagcctacactctttccctacacgacgctcttccgatctacgtctgccacgtctgcc

SEQ ID NO: 2930 - DNA, 92 bp, Artificial Sequence
  Description of Artificial Sequence: Synthetic primer
aatgatacggcgaccaccgagatctacactatagcctacactctttccctacacgacgctcttccgatctccaggtcttcacctcagacact

SEQ ID NO: 2931 - DNA, 91 bp, Artificial Sequence
  Description of Artificial Sequence: Synthetic primer
aatgatacggcgaccaccgagatctacactatagcctacactctttccctacacgacgctcttccgatcttagcagccttgtttgcctctg

SEQ ID NO: 2932 - DNA, 90 bp, Artificial Sequence
  Description of Artificial Sequence: Synthetic primer
aatgatacggcgaccaccgagatctacactatagcctacactctttccctacacgacgctcttccgatctctgaccgcaggccaggagac

SEQ ID NO: 2933 - DNA, 90 bp, Artificial Sequence
  Description of Artificial Sequence: Synthetic primer
aatgatacggcgaccaccgagatctacactatagcctacactctttccctacacgacgctcttccgatctggagacttacagcgcgaggg

SEQ ID NO: 2934 - DNA, 90 bp, Artificial Sequence
  Description of Artificial Sequence: Synthetic primer
aatgatacggcgaccaccgagatctacactatagcctacactctttccctacacgacgctcttccgatctgcgcagagaggacaggaggc

SEQ ID NO: 2935 - DNA, 88 bp, Artificial Sequence
  Description of Artificial Sequence: Synthetic primer
aatgatacggcgaccaccgagatctacactatagcctacactctttccctacacgacgctcttccgatctgggccacagcaccatgca

SEQ ID NO: 2936 - DNA, 89 bp, Artificial Sequence
  Description of Artificial Sequence: Synthetic primer
aatgatacggcgaccaccgagatctacactatagcctacactctttccctacacgacgctcttccgatctgcagagaggacaggaggcc

SEQ ID NO: 2937 - DNA, 89 bp, Artificial Sequence
  Description of Artificial Sequence: Synthetic primer
aatgatacggcgaccaccgagatctacactatagcctacactctttccctacacgacgctcttccgatctgacagggccacagcaccat

SEQ ID NO: 2938 - DNA, 99 bp, Artificial Sequence
  Description of Artificial Sequence: Synthetic primer
aatgatacggcgaccaccgagatctacactatagcctacactctttccctacacgacgctcttccgatctagacctagttaccaaaagacaattatcct

SEQ ID NO: 2939 - DNA, 100 bp, Artificial Sequence
  Description of Artificial Sequence: Synthetic polynucleotide
aatgatacggcgaccaccgagatctacactatagcctacactctttccctacacgacgctcttccgatctagtgttaatttgaccatagaaactagggca

SEQ ID NO: 2940 - DNA, 93 bp, Artificial Sequence
  Description of Artificial Sequence: Synthetic primer
aatgatacggcgaccaccgagatctacactatagcctacactctttccctacacgacgctcttccgatctggagagcactctctggtgagaaa

SEQ ID NO: 2941 - DNA, 90 bp, Artificial Sequence
  Description of Artificial Sequence: Synthetic primer
aatgatacggcgaccaccgagatctacactatagcctacactctttccctacacgacgctcttccgatctgttcctacaggccaggctcc

SEQ ID NO: 2942 - DNA, 100 bp, Artificial Sequence
  Description of Artificial Sequence: Synthetic polynucleotide
aatgatacggcgaccaccgagatctacactatagcctacactctttccctacacgacgctcttccgatcttgtcagcttacttgagaataaagaaaaagt

SEQ ID NO: 2943 - DNA, 98 bp, Artificial Sequence
  Description of Artificial Sequence: Synthetic primer
aatgatacggcgaccaccgagatctacactatagcctacactctttccctacacgacgctcttccgatctgcagtcacataactaacaaaaaaagcaa

SEQ ID NO: 2944 - DNA, 100 bp, Artificial Sequence
  Description of Artificial Sequence: Synthetic polynucleotide
aatgatacggcgaccaccgagatctacactatagcctacactctttccctacacgacgctcttccgatctaacatgcaaaatcacattattgccaacatg

SEQ ID NO: 2945 - DNA, 99 bp, Artificial Sequence
  Description of Artificial Sequence: Synthetic primer
aatgatacggcgaccaccgagatctacactatagcctacactctttccctacacgacgctcttccgatctatttgacgccaacattatgcttctttata

SEQ ID NO: 2946 - DNA, 93 bp, Artificial Sequence
  Description of Artificial Sequence: Synthetic primer
aatgatacggcgaccaccgagatctacactatagcctacactctttccctacacgacgctcttccgatctcctttctgagtttgctacacgga

SEQ ID NO: 2947 - DNA, 90 bp, Artificial Sequence
  Description of Artificial Sequence: Synthetic primer
aatgatacggcgaccaccgagatctacactatagcctacactctttccctacacgacgctcttccgatctctgtgaggctcaccctctgc

SEQ ID NO: 2948 - DNA, 89 bp, Artificial Sequence
  Description of Artificial Sequence: Synthetic primer
aatgatacggcgaccaccgagatctacactatagcctacactctttccctacacgacgctcttccgatctcccagggtctgcctaccac

SEQ ID NO: 2949 - DNA, 92 bp, Artificial Sequence
  Description of Artificial Sequence: Synthetic primer
aatgatacggcgaccaccgagatctacactatagcctacactctttccctacacgacgctcttccgatctccatgctcacctgatgaggtct

SEQ ID NO: 2950 - DNA, 89 bp, Artificial Sequence; identical to SEQ ID NO: 2948
  Description of Artificial Sequence: Synthetic primer

SEQ ID NO: 2951 - DNA, 89 bp, Artificial Sequence
  Description of Artificial Sequence: Synthetic primer
aatgatacggcgaccaccgagatctacactatagcctacactctttccctacacgacgctcttccgatctggtcaggctcgtccttcca

SEQ ID NO: 2952 - DNA, 89 bp, Artificial Sequence
  Description of Artificial Sequence: Synthetic primer
aatgatacggcgaccaccgagatctacactatagcctacactctttccctacacgacgctcttccgatctgcctctccctccatgctca

SEQ ID NO: 2953 - DNA, 90 bp, Artificial Sequence
  Description of Artificial Sequence: Synthetic primer
aatgatacggcgaccaccgagatctacactatagcctacactctttccctacacgacgctcttccgatctccatgccctgcactcacctt

SEQ ID NO: 2954 - DNA, 90 bp, Artificial Sequence
  Description of Artificial Sequence: Synthetic primer
aatgatacggcgaccaccgagatctacactatagcctacactctttccctacacgacgctcttccgatctcacagggagcagcgtcctcc

SEQ ID NO: 2955 - DNA, 97 bp, Artificial Sequence
  Description of Artificial Sequence: Synthetic primer
aatgatacggcgaccaccgagatctacactatagcctacactctttccctacacgacgctcttccgatctcatggatgaggctttacttgtcaaaga

SEQ ID NO: 2956 - DNA, 95 bp, Artificial Sequence
  Description of Artificial Sequence: Synthetic primer
aatgatacggcgaccaccgagatctacactatagcctacactctttccctacacgacgctcttccgatctagagatgaagagacaagctgggaga

SEQ ID NO: 2957 - DNA, 93 bp, Artificial Sequence
  Description of Artificial Sequence: Synthetic primer
aatgatacggcgaccaccgagatctacactatagcctacactctttccctacacgacgctcttccgatctaggcgtgggatgtttttgcagat

SEQ ID NO: 2958 - DNA, 89 bp, Artificial Sequence
  Description of Artificial Sequence: Synthetic primer
aatgatacggcgaccaccgagatctacactatagcctacactctttccctacacgacgctcttccgatctccacctccacaccctcgca

SEQ ID NO: 2959 - DNA, 90 bp, Artificial Sequence
  Description of Artificial Sequence: Synthetic primer
aatgatacggcgaccaccgagatctacactatagcctacactctttccctacacgacgctcttccgatctagccacccacttcaggaggg

SEQ ID NO: 2960 - DNA, 86 bp, Artificial Sequence
  Description of Artificial Sequence: Synthetic primer
aatgatacggcgaccaccgagatctacactatagcctacactctttccctacacgacgctcttccgatctaagccgccacgtcgca

SEQ ID NO: 2961 - DNA, 96 bp, Artificial Sequence
  Description of Artificial Sequence: Synthetic primer
aatgatacggcgaccaccgagatctacactatagcctacactctttccctacacgacgctcttccgatctcaggcaaatgttctgaaaaagactct

SEQ ID NO: 2962 - DNA, 96 bp, Artificial Sequence
  Description of Artificial Sequence: Synthetic primer
aatgatacggcgaccaccgagatctacactatagcctacactctttccctacacgacgctcttccgatcttctgaggcagattatctgacctttcc

SEQ ID NO: 2963 - DNA, 101 bp, Artificial Sequence
  Description of Artificial Sequence: Synthetic polynucleotide
aatgatacggcgaccaccgagatctacactatagcctacactctttccctacacgacgctcttccgatcttgtacctttaataattcctttctctgcttct

SEQ ID NO: 2964 - DNA, 98 bp, Artificial Sequence
  Description of Artificial Sequence: Synthetic primer
aatgatacggcgaccaccgagatctacactatagcctacactctttccctacacgacgctcttccgatctgtatttgaactatttggaagctgaccaa

SEQ ID NO: 2965 - DNA, 102 bp, Artificial Sequence
  Description of Artificial Sequence: Synthetic polynucleotide
aatgatacggcgaccaccgagatctacactatagcctacactctttccctacacgacgctcttccgatctcatgataatgaaacttacgatgagatatttcc

SEQ ID NO: 2966 - DNA, 99 bp, Artificial Sequence
  Description of Artificial Sequence: Synthetic primer
aatgatacggcgaccaccgagatctacactatagcctacactctttccctacacgacgctcttccgatctttaatcatggaaaaaggtggtaacttctt

SEQ ID NO: 2967 - DNA, 95 bp, Artificial Sequence
  Description of Artificial Sequence: Synthetic primer
aatgatacggcgaccaccgagatctacactatagcctacactctttccctacacgacgctcttccgatctcagtctgccttctacacagagaaat

SEQ ID NO: 2968 - DNA, 102 bp, Artificial Sequence
  Description of Artificial Sequence: Synthetic polynucleotide
aatgatacggcgaccaccgagatctacactatagcctacactctttccctacacgacgctcttccgatcttggctctgtaaattctacccgtttttaatttt

SEQ ID NO: 2969 - DNA, 100 bp, Artificial Sequence
  Description of Artificial Sequence: Synthetic polynucleotide
aatgatacggcgaccaccgagatctacactatagcctacactctttccctacacgacgctcttccgatctaaaggtgctatttctttttcttttctctgc

SEQ ID NO: 2970 - DNA, 100 bp, Artificial Sequence
  Description of Artificial Sequence: Synthetic polynucleotide
aatgatacggcgaccaccgagatctacactatagcctacactctttccctacacgacgctcttccgatcttgattgttttagatgacacttggtcataat

SEQ ID NO: 2971 - DNA, 99 bp, Artificial Sequence
  Description of Artificial Sequence: Synthetic primer
aatgatacggcgaccaccgagatctacactatagcctacactctttccctacacgacgctcttccgatctcattgtgactatccctccctttctttata

SEQ ID NO: 2972 - DNA, 98 bp, Artificial Sequence
  Description of Artificial Sequence: Synthetic primer
aatgatacggcgaccaccgagatctacactatagcctacactctttccctacacgacgctcttccgatcttggagcaattcatactttcagtgtattt

SEQ ID NO: 2973 - DNA, 101 bp, Artificial Sequence
  Description of Artificial Sequence: Synthetic polynucleotide
aatgatacggcgaccaccgagatctacactatagcctacactctttccctacacgacgctcttccgatctcctacttcgttctccatctttactcattctt

SEQ ID NO: 2974 - DNA, 102 bp, Artificial Sequence
  Description of Artificial Sequence: Synthetic polynucleotide
aatgatacggcgaccaccgagatctacactatagcctacactctttccctacacgacgctcttccgatctgacaacagtcaaacaacaattctttgtacttt

SEQ ID NO: 2975 - DNA, 102 bp, Artificial Sequence
  Description of Artificial Sequence: Synthetic polynucleotide
aatgatacggcgaccaccgagatctacactatagcctacactctttccctacacgacgctcttccgatctgccaatttaatttctttacctataatggtcac

SEQ ID NO: 2976 - DNA, 98 bp, Artificial Sequence
  Description of Artificial Sequence: Synthetic primer
aatgatacggcgaccaccgagatctacactatagcctacactctttccctacacgacgctcttccgatctatggaaacttgaagttgctaaacagttg

SEQ ID NO: 2977 - DNA, 98 bp, Artificial Sequence
  Description of Artificial Sequence: Synthetic primer
aatgatacggcgaccaccgagatctacactatagcctacactctttccctacacgacgctcttccgatctgcttgaacatactaaatgctccagtact

SEQ ID NO: 2978 - DNA, 103 bp, Artificial Sequence
  Description of Artificial Sequence: Synthetic polynucleotide
aatgatacggcgaccaccgagatctacactatagcctacactctttccctacacgacgctcttccgatctgaattatttaaccctactctgttcgtatcattt

SEQ ID NO: 2979 - DNA, 95 bp, Artificial Sequence
  Description of Artificial Sequence: Synthetic primer
aatgatacggcgaccaccgagatctacactatagcctacactctttccctacacgacgctcttccgatctatgaagataggcatcagcttcctgc

SEQ ID NO: 2980 - DNA, 105 bp, Artificial Sequence
  Description of Artificial Sequence: Synthetic polynucleotide
aatgatacggcgaccaccgagatctacactatagcctacactctttccctacacgacgctcttccgatctttagtccagagaatgttatttgctaatttaaggtg

SEQ ID NO: 2981 - DNA, 101 bp, Artificial Sequence
  Description of Artificial Sequence: Synthetic polynucleotide
aatgatacggcgaccaccgagatctacactatagcctacactctttccctacacgacgctcttccgatctgccttgaaaacttggtatttccatcctaatg

SEQ ID NO: 2982 - DNA, 97 bp, Artificial Sequence
  Description of Artificial Sequence: Synthetic primer
aatgatacggcgaccaccgagatctacactatagcctacactctttccctacacgacgctcttccgatcttggcagagtaaaacattatttccacct

SEQ ID NO: 2983 - DNA, 100 bp, Artificial Sequence
  Description of Artificial Sequence: Synthetic polynucleotide
aatgatacggcgaccaccgagatctacactatagcctacactctttccctacacgacgctcttccgatctggagtatcttggtacaaaaaggtatatcca

SEQ ID NO: 2984 - DNA, 102 bp, Artificial Sequence
  Description of Artificial Sequence: Synthetic polynucleotide
aatgatacggcgaccaccgagatctacactatagcctacactctttccctacacgacgctcttccgatctatcaagagtccacatatcaagtaactgtcttt

SEQ ID NO: 2985 - DNA, 100 bp, Artificial Sequence
  Description of Artificial Sequence: Synthetic polynucleotide
aatgatacggcgaccaccgagatctacactatagcctacactctttccctacacgacgctcttccgatctggaggaaattgagaaagaattttgctacaa

SEQ ID NO: 2986 - DNA, 99 bp, Artificial Sequence
  Description of Artificial Sequence: Synthetic primer
aatgatacggcgaccaccgagatctacactatagcctacactctttccctacacgacgctcttccgatctagatggcccttagtgttcatttaattttg

SEQ ID NO: 2987 - DNA, 90 bp, Artificial Sequence
  Description of Artificial Sequence: Synthetic primer
aatgatacggcgaccaccgagatctacactatagcctacactctttccctacacgacgctcttccgatcttgggcgagagctggaacgtg

SEQ ID NO: 2988 - DNA, 100 bp, Artificial Sequence
  Description of Artificial Sequence: Synthetic polynucleotide
aatgatacggcgaccaccgagatctacactatagcctacactctttccctacacgacgctcttccgatcttcatactcaacacgattctgtttttcttgg

SEQ ID NO: 2989 - DNA, 98 bp, Artificial Sequence
  Description of Artificial Sequence: Synthetic primer
aatgatacggcgaccaccgagatctacactatagcctacactctttccctacacgacgctcttccgatctgaataagcagaatgaatggatcacggaa

SEQ ID NO: 2990 - DNA, 99 bp, Artificial Sequence
  Description of Artificial Sequence: Synthetic primer
aatgatacggcgaccaccgagatctacactatagcctacactctttccctacacgacgctcttccgatctattccaactactgattttggatatgcttc

SEQ ID NO: 2991 - DNA, 91 bp, Artificial Sequence
  Description of Artificial Sequence: Synthetic primer
aatgatacggcgaccaccgagatctacactatagcctacactctttccctacacgacgctcttccgatcttgttctgtggaccaggagggc

SEQ ID NO: 2992 - DNA, 100 bp, Artificial Sequence
  Description of Artificial Sequence: Synthetic polynucleotide
aatgatacggcgaccaccgagatctacactatagcctacactctttccctacacgacgctcttccgatctgtacacatttgaggagaaatggtaaatcaa

SEQ ID NO: 2993 - DNA, 102 bp, Artificial Sequence
  Description of Artificial Sequence: Synthetic polynucleotide
aatgatacggcgaccaccgagatctacactatagcctacactctttccctacacgacgctcttccgatctttcatttttttttctccttttctgaaaccagc

SEQ ID NO: 2994 - DNA, 103 bp, Artificial Sequence
  Description of Artificial Sequence: Synthetic polynucleotide
aatgatacggcgaccaccgagatctacactatagcctacactctttccctacacgacgctcttccgatctccagtagttgtagataatggtttctttctgtct

SEQ ID NO: 2995 - DNA, 95 bp, Artificial Sequence
  Description of Artificial Sequence: Synthetic primer
aatgatacggcgaccaccgagatctacactatagcctacactctttccctacacgacgctcttccgatctcatgctatccacaggtgattgacta

SEQ ID NO: 2996 - DNA, 94 bp, Artificial Sequence
  Description of Artificial Sequence: Synthetic primer
aatgatacggcgaccaccgagatctacactatagcctacactctttccctacacgacgctcttccgatctgctgaggttttccagcactctgac

SEQ ID NO: 2997 - DNA, 93 bp, Artificial Sequence
  Description of Artificial Sequence: Synthetic primer
aatgatacggcgaccaccgagatctacactatagcctacactctttccctacacgacgctcttccgatctccagggcttttgttttcttccct

SEQ ID NO: 2998 - DNA, 100 bp, Artificial Sequence
  Description of Artificial Sequence: Synthetic polynucleotide
aatgatacggcgaccaccgagatctacactatagcctacactctttccctacacgacgctcttccgatctaagtttgtgattccacatttctcttccatt

SEQ ID NO: 2999 - DNA, 99 bp, Artificial Sequence
  Description of Artificial Sequence: Synthetic primer
aatgatacggcgaccaccgagatctacactatagcctacactctttccctacacgacgctcttccgatctaggaaaatgtctctggacaacattgtttt

SEQ ID NO: 3000 - DNA, 98 bp, Artificial Sequence
  Description of Artificial Sequence: Synthetic primer
aatgatacggcgaccaccgagatctacactatagcctacactctttccctacacgacgctcttccgatctaaaggtgatctatttttccctttctccc

SEQ ID NO: 3001 - DNA, 94 bp, Artificial Sequence
  Description of Artificial Sequence: Synthetic primer
aatgatacggcgaccaccgagatctacactatagcctacactctttccctacacgacgctcttccgatctaaggttgttgaggcaactgcttat

SEQ ID NO: 3002 - DNA, 92 bp, Artificial Sequence
  Description of Artificial Sequence: Synthetic primer
aatgatacggcgaccaccgagatctacactatagcctacactctttccctacacgacgctcttccgatctaccagcaccatcaccacttacc

SEQ ID NO: 3003 - DNA, 93 bp, Artificial Sequence
  Description of Artificial Sequence: Synthetic primer
aatgatacggcgaccaccgagatctacactatagcctacactctttccctacacgacgctcttccgatctttgacagaacgggaagccctcat

SEQ ID NO: 3004 - DNA, 98 bp, Artificial Sequence
  Description of Artificial Sequence: Synthetic primer
aatgatacggcgaccaccgagatctacactatagcctacactctttccctacacgacgctcttccgatctaccttctttctaaccttttcttatgtgc

SEQ ID NO: 3005 - DNA, 93 bp, Artificial Sequence
  Description of Artificial Sequence: Synthetic primer
aatgatacggcgaccaccgagatctacactatagcctacactctttccctacacgacgctcttccgatcttgacccatgagtgcccttctaca

SEQ ID NO: 3006 - DNA, 104 bp, Artificial Sequence
  Description of Artificial Sequence: Synthetic polynucleotide
aatgatacggcgaccaccgagatctacactatagcctacactctttccctacacgacgctcttccgatctcctgacctttatggttgtaattgctaagaaaaat

SEQ ID NO: 3007 - DNA, 102 bp, Artificial Sequence
  Description of Artificial Sequence: Synthetic polynucleotide
aatgatacggcgaccaccgagatctacactatagcctacactctttccctacacgacgctcttccgatctgcgtacttttgatttttatttttggtgtactg

SEQ ID NO: 3008 - DNA, 95 bp, Artificial Sequence
  Description of Artificial Sequence: Synthetic primer
aatgatacggcgaccaccgagatctacactatagcctacactctttccctacacgacgctcttccgatctacttggcagccagaaatatcctcct

SEQ ID NO: 3009 - DNA, 102 bp, Artificial Sequence
  Description of Artificial Sequence: Synthetic polynucleotide
aatgatacggcgaccaccgagatctacactatagcctacactctttccctacacgacgctcttccgatctaatatcttctgttcaattttgttgagcttctg

SEQ ID NO: 3010 - DNA, 96 bp, Artificial Sequence
  Description of Artificial Sequence: Synthetic primer
aatgatacggcgaccaccgagatctacactatagcctacactctttccctacacgacgctcttccgatctggtgtcctgcttccttgtgattaaca

SEQ ID NO: 3011 - DNA, 91 bp, Artificial Sequence
  Description of Artificial Sequence: Synthetic primer
aatgatacggcgaccaccgagatctacactatagcctacactctttccctacacgacgctcttccgatctaacaagctgagggcattgagg

SEQ ID NO: 3012 - DNA, 94 bp, Artificial Sequence
  Description of Artificial Sequence: Synthetic primer
aatgatacggcgaccaccgagatctacactatagcctacactctttccctacacgacgctcttccgatcttgttcgttgtagggactgctgtat

SEQ ID NO: 3013 - DNA, 91 bp, Artificial Sequence
  Description of Artificial Sequence: Synthetic primer
aatgatacggcgaccaccgagatctacactatagcctacactctttccctacacgacgctcttccgatctcctaatccagaggtctgcggg

SEQ ID NO: 3014 - DNA, 93 bp, Artificial Sequence
  Description of Artificial Sequence: Synthetic primer
aatgatacggcgaccaccgagatctacactatagcctacactctttccctacacgacgctcttccgatcttacagactgggaaactgaggcta

SEQ ID NO: 3015 - DNA, 92 bp, Artificial Sequence
  Description of Artificial Sequence: Synthetic primer
aatgatacggcgaccaccgagatctacactatagcctacactctttccctacacgacgctcttccgatctgcgcagacaggttggagattgg

SEQ ID NO: 3016 - DNA, 88 bp, Artificial Sequence
  Description of Artificial Sequence: Synthetic primer
aatgatacggcgaccaccgagatctacactatagcctacactctttccctacacgacgctcttccgatctagcaaagcagcgggaggg

SEQ ID NO: 3017 - DNA, 88 bp, Artificial Sequence
  Description of Artificial Sequence: Synthetic primer
aatgatacggcgaccaccgagatctacactatagcctacactctttccctacacgacgctcttccgatcttcagccttcaccgcgacc

SEQ ID NO: 3018 - DNA, 92 bp, Artificial Sequence
  Description of Artificial Sequence: Synthetic primer
aatgatacggcgaccaccgagatctacactatagcctacactctttccctacacgacgctcttccgatctttggttcactcatccgggagct

SEQ ID NO: 3019 - DNA, 94 bp, Artificial Sequence
  Description of Artificial Sequence: Synthetic primer
aatgatacggcgaccaccgagatctacactatagcctacactctttccctacacgacgctcttccgatctttgaggtgtctctcctcgaagatc

SEQ ID NO: 3020 - DNA, 94 bp, Artificial Sequence
  Description of Artificial Sequence: Synthetic primer
aatgatacggcgaccaccgagatctacactatagcctacactctttccctacacgacgctcttccgatctccaatatgacatcacagccctccc

SEQ ID NO: 3021 - DNA, 93 bp, Artificial Sequence
  Description of Artificial Sequence: Synthetic primer
aatgatacggcgaccaccgagatctacactatagcctacactctttccctacacgacgctcttccgatcttgagcactgagggaatgaaagtg

SEQ ID NO: 3022 - DNA, 89 bp, Artificial Sequence
  Description of Artificial Sequence: Synthetic primer
aatgatacggcgaccaccgagatctacactatagcctacactctttccctacacgacgctcttccgatctaatggagggtggagcaggc

SEQ ID NO: 3023 - DNA, 91 bp, Artificial Sequence
  Description of Artificial Sequence: Synthetic primer
aatgatacggcgaccaccgagatctacactatagcctacactctttccctacacgacgctcttccgatctcctagacttgggtgaggcagg

SEQ ID NO: 3024 - DNA, 92 bp, Artificial Sequence
  Description of Artificial Sequence: Synthetic primer
aatgatacggcgaccaccgagatctacactatagcctacactctttccctacacgacgctcttccgatctcgactccaaaagtctggtccac

SEQ ID NO: 3025 - DNA, 94 bp, Artificial Sequence
  Description of Artificial Sequence: Synthetic primer
aatgatacggcgaccaccgagatctacactatagcctacactctttccctacacgacgctcttccgatctcagactgaggtatcgcctcatttc

SEQ ID NO: 3026 - DNA, 92 bp, Artificial Sequence
  Description of Artificial Sequence: Synthetic primer
aatgatacggcgaccaccgagatctacactatagcctacactctttccctacacgacgctcttccgatctagatcagccactcattccaggg

SEQ ID NO: 3027 - DNA, 89 bp, Artificial Sequence
  Description of Artificial Sequence: Synthetic primer
aatgatacggcgaccaccgagatctacactatagcctacactctttccctacacgacgctcttccgatctccaggcagccctccactac

SEQ ID NO: 3028 - DNA, 90 bp, Artificial Sequence
  Description of Artificial Sequence: Synthetic primer
aatgatacggcgaccaccgagatctacactatagcctacactctttccctacacgacgctcttccgatctccacagaggccgggaatggg

SEQ ID NO: 3029 - DNA, 95 bp, Artificial Sequence
  Description of Artificial Sequence: Synthetic primer
aatgatacggcgaccaccgagatctacactatagcctacactctttccctacacgacgctcttccgatctatcctgcacccactaaaatctggtt

SEQ ID NO: 3030 - DNA, 89 bp, Artificial Sequence
  Description of Artificial Sequence: Synthetic primer
aatgatacggcgaccaccgagatctacactatagcctacactctttccctacacgacgctcttccgatcttttcgttttggctccgccc

SEQ ID NO: 3031 - DNA, 90 bp, Artificial Sequence
  Description of Artificial Sequence: Synthetic primer
aatgatacggcgaccaccgagatctacactatagcctacactctttccctacacgacgctcttccgatctaccgtcctccgaatacgcct

SEQ ID NO: 3032 - DNA, 88 bp, Artificial Sequence
  Description of Artificial Sequence: Synthetic primer
aatgatacggcgaccaccgagatctacactatagcctacactctttccctacacgacgctcttccgatctactcccaagcagaggccg

SEQ ID NO: 3033 - DNA, 91 bp, Artificial Sequence
  Description of Artificial Sequence: Synthetic primer
aatgatacggcgaccaccgagatctacactatagcctacactctttccctacacgacgctcttccgatctgcaaagaggtgctccaggact

SEQ ID NO: 3034 - DNA, 99 bp, Artificial Sequence
  Description of Artificial Sequence: Synthetic primer
aatgatacggcgaccaccgagatctacactatagcctacactctttccctacacgacgctcttccgatctacctcgaaatgcaaggagatgataaaatt

SEQ ID NO: 3035 - DNA, 90 bp, Artificial Sequence
  Description of Artificial Sequence: Synthetic primer
aatgatacggcgaccaccgagatctacactatagcctacactctttccctacacgacgctcttccgatcttctggcccgatccactaggg

SEQ ID NO: 3036 - DNA, 93 bp, Artificial Sequence
  Description of Artificial Sequence: Synthetic primer
aatgatacggcgaccaccgagatctacactatagcctacactctttccctacacgacgctcttccgatcttcatgtgatgtccaggagttggg

SEQ ID NO: 3037 - DNA, 99 bp, Artificial Sequence
  Description of Artificial Sequence: Synthetic primer
aatgatacggcgaccaccgagatctacactatagcctacactctttccctacacgacgctcttccgatcttcctaagttccttccaaaaattcctattg

SEQ ID NO: 3038 - DNA, 103 bp, Artificial Sequence
  Description of Artificial Sequence: Synthetic polynucleotide
aatgatacggcgaccaccgagatctacactatagcctacactctttccctacacgacgctcttccgatctctagtgtttcatcctttgtattatttctaagac

SEQ ID NO: 3039 - DNA, 91 bp, Artificial Sequence
  Description of Artificial Sequence: Synthetic primer
aatgatacggcgaccaccgagatctacactatagcctacactctttccctacacgacgctcttccgatctatggccttgaagtcaccctcc

SEQ ID NO: 3040 - DNA, 96 bp, Artificial Sequence
  Description of Artificial Sequence: Synthetic primer
aatgatacggcgaccaccgagatctacactatagcctacactctttccctacacgacgctcttccgatcttactctttgtaggtgcttcttggatg

SEQ ID NO: 3041 - DNA, 95 bp, Artificial Sequence
  Description of Artificial Sequence: Synthetic primer
aatgatacggcgaccaccgagatctacactatagcctacactctttccctacacgacgctcttccgatctaggagaatttgcgagcaaagaaaga

SEQ ID NO: 3042 - DNA, 97 bp, Artificial Sequence
  Description of Artificial Sequence: Synthetic primer
aatgatacggcgaccaccgagatctacactatagcctacactctttccctacacgacgctcttccgatctgtcttcctctttggagtctggatggaa

SEQ ID NO: 3043 - DNA, 95 bp, Artificial Sequence; identical to SEQ ID NO: 3041
  Description of Artificial Sequence: Synthetic primer

SEQ ID NO: 3044 - DNA, 100 bp, Artificial Sequence
  Description of Artificial Sequence: Synthetic polynucleotide
aatgatacggcgaccaccgagatctacactatagcctacactctttccctacacgacgctcttccgatctttcagaacccaaattagcaaatatctgaag

SEQ ID NO: 3045 - DNA, 96 bp, Artificial Sequence
  Description of Artificial Sequence: Synthetic primer
aatgatacggcgaccaccgagatctacactatagcctacactctttccctacacgacgctcttccgatcttctggatggaaggacaaaaagaaatg

SEQ ID NO: 3046 - DNA, 104 bp, Artificial Sequence
  Description of Artificial Sequence: Synthetic polynucleotide
aatgatacggcgaccaccgagatctacactatagcctacactctttccctacacgacgctcttccgatctaacttacatctccttttctgacataatctggatc

SEQ ID NO: 3047 - DNA, 97 bp, Artificial Sequence
  Description of Artificial Sequence: Synthetic primer
aatgatacggcgaccaccgagatctacactatagcctacactctttccctacacgacgctcttccgatctgtgatctgaaaagatagctgatttccc

SEQ ID NO: 3048 - DNA, 91 bp, Artificial Sequence
  Description of Artificial Sequence: Synthetic primer
aatgatacggcgaccaccgagatctacactatagcctacactctttccctacacgacgctcttccgatctcaccctatcaccctgtctgct

SEQ ID NO: 3049 - DNA, 100 bp, Artificial Sequence
  Description of Artificial Sequence: Synthetic polynucleotide
aatgatacggcgaccaccgagatctacactatagcctacactctttccctacacgacgctcttccgatctctaacctgtaccattttgagtttcccttca

SEQ ID NO: 3050 - DNA, 95 bp, Artificial Sequence
  Description of Artificial Sequence: Synthetic primer
aatgatacggcgaccaccgagatctacactatagcctacactctttccctacacgacgctcttccgatcttcaaacactatcagagaggcatgtt

SEQ ID NO: 3051 - DNA, 99 bp, Artificial Sequence
  Description of Artificial Sequence: Synthetic primer
aatgatacggcgaccaccgagatctacactatagcctacactctttccctacacgacgctcttccgatctagaaagatagatcaccacataattttgct

SEQ ID NO: 3052 - DNA, 102 bp, Artificial Sequence
  Description of Artificial Sequence: Synthetic polynucleotide
aatgatacggcgaccaccgagatctacactatagcctacactctttccctacacgacgctcttccgatctagatggcctggtaaacacaatatcaaattaat

SEQ ID NO: 3053 - DNA, 94 bp, Artificial Sequence
  Description of Artificial Sequence: Synthetic primer
aatgatacggcgaccaccgagatctacactatagcctacactctttccctacacgacgctcttccgatcttgaaaaccaatgtgcatgggcaga

SEQ ID NO: 3054 - DNA, 97 bp, Artificial Sequence
  Description of Artificial Sequence: Synthetic primer
aatgatacggcgaccaccgagatctacactatagcctacactctttccctacacgacgctcttccgatcttcagattcctttttacggctgcatagc

SEQ ID NO: 3055 - DNA, 101 bp, Artificial Sequence
  Description of Artificial Sequence: Synthetic polynucleotide
aatgatacggcgaccaccgagatctacactatagcctacactctttccctacacgacgctcttccgatctcaacccaagagtgatagccaaattctattta

SEQ ID NO: 3056 - DNA, 96 bp, Artificial Sequence
  Description of Artificial Sequence: Synthetic primer
aatgatacggcgaccaccgagatctacactatagcctacactctttccctacacgacgctcttccgatcttgcacaatgatccagaattgtctccc

SEQ ID NO: 3057 - DNA, 98 bp, Artificial Sequence
  Description of Artificial Sequence: Synthetic primer
aatgatacggcgaccaccgagatctacactatagcctacactctttccctacacgacgctcttccgatcttgtaccatgtgaggttctcaaacgtaga

SEQ ID NO: 3058 - DNA, 95 bp, Artificial Sequence
  Description of Artificial Sequence: Synthetic primer
aatgatacggcgaccaccgagatctacactatagcctacactctttccctacacgacgctcttccgatctcaacccaaacctccagagaagagta

SEQ ID NO: 3059 - DNA, 99 bp, Artificial Sequence
  Description of Artificial Sequence: Synthetic primer
aatgatacggcgaccaccgagatctacactatagcctacactctttccctacacgacgctcttccgatctccttccattaaagagagagagattttcaa

SEQ ID NO: 3060 - DNA, 92 bp, Artificial Sequence
  Description of Artificial Sequence: Synthetic primer
aatgatacggcgaccaccgagatctacactatagcctacactctttccctacacgacgctcttccgatctagcaaagagcatgtggccttac

SEQ ID NO: 3061 - DNA, 95 bp, Artificial Sequence
  Description of Artificial Sequence: Synthetic primer
aatgatacggcgaccaccgagatctacactatagcctacactctttccctacacgacgctcttccgatcttcttgggcagagaggaaaattgaat

SEQ ID NO: 3062 - DNA, 93 bp, Artificial Sequence
  Description of Artificial Sequence: Synthetic primer
aatgatacggcgaccaccgagatctacactatagcctacactctttccctacacgacgctcttccgatctgtaaccaaggtacttcgcaggga

SEQ ID NO: 3063 - DNA, 96 bp, Artificial Sequence
  Description of Artificial Sequence: Synthetic primer
aatgatacggcgaccaccgagatctacactatagcctacactctttccctacacgacgctcttccgatcttgtcaaggcacagaataatttccaag

SEQ ID NO: 3064 - DNA, 97 bp, Artificial Sequence
  Description of Artificial Sequence: Synthetic primer
aatgatacggcgaccaccgagatctacactatagcctacactctttccctacacgacgctcttccgatcttttggaggtctggctttgaatcattag

SEQ ID NO: 3065 - DNA, 100 bp, Artificial Sequence
  Description of Artificial Sequence: Synthetic polynucleotide
aatgatacggcgaccaccgagatctacactatagcctacactctttccctacacgacgctcttccgatcttcttcactctatgttgttatctccaagatc

SEQ ID NO: 3066 - DNA, 96 bp, Artificial Sequence
  Description of Artificial Sequence: Synthetic primer
aatgatacggcgaccaccgagatctacactatagcctacactctttccctacacgacgctcttccgatctgagacgattggaggagatgcaactta

SEQ ID NO: 3067 - DNA, 96 bp, Artificial Sequence
  Description of Artificial Sequence: Synthetic primer
aatgatacggcgaccaccgagatctacactatagcctacactctttccctacacgacgctcttccgatctaactggtaaagagacgtgggaaatga

SEQ ID NO: 3068 - DNA, 102 bp, Artificial Sequence
  Description of Artificial Sequence: Synthetic polynucleotide
aatgatacggcgaccaccgagatctacactatagcctacactctttccctacacgacgctcttccgatctccactcaataaacaatcagttacttaacacaa

SEQ ID NO: 3069 - DNA, 90 bp, Artificial Sequence
  Description of Artificial Sequence: Synthetic primer
aatgatacggcgaccaccgagatctacactatagcctacactctttccctacacgacgctcttccgatcttcctccagagtgggctcctt

SEQ ID NO: 3070 - DNA, 90 bp, Artificial Sequence
  Description of Artificial Sequence: Synthetic primer
aatgatacggcgaccaccgagatctacactatagcctacactctttccctacacgacgctcttccgatctggagttggaagcgcgttacc

SEQ ID NO: 3071 - DNA, 94 bp, Artificial Sequence
  Description of Artificial Sequence: Synthetic primer
aatgatacggcgaccaccgagatctacactatagcctacactctttccctacacgacgctcttccgatcttggtgacagtattgacttgtgctc

SEQ ID NO: 3072 - DNA, 98 bp, Artificial Sequence
  Description of Artificial Sequence: Synthetic primer
aatgatacggcgaccaccgagatctacactatagcctacactctttccctacacgacgctcttccgatctccttcctccctctttctttcataaaacc

SEQ ID NO: 3073 - DNA, 97 bp, Artificial Sequence
  Description of Artificial Sequence: Synthetic primer
aatgatacggcgaccaccgagatctacactatagcctacactctttccctacacgacgctcttccgatctttagaacattgtcactaactggtctgg

SEQ ID NO: 3074 - DNA, 103 bp, Artificial Sequence
  Description of Artificial Sequence: Synthetic polynucleotide
aatgatacggcgaccaccgagatctacactatagcctacactctttccctacacgacgctcttccgatctagtattttcttttcttttacattccctttcctc

SEQ ID NO: 3075 - DNA, 99 bp, Artificial Sequence
  Description of Artificial Sequence: Synthetic primer
aatgatacggcgaccaccgagatctacactatagcctacactctttccctacacgacgctcttccgatctagttccctccttttctattttctcttccc

SEQ ID NO: 3076 - DNA, 95 bp, Artificial Sequence
  Description of Artificial Sequence: Synthetic primer
aatgatacggcgaccaccgagatctacactatagcctacactctttccctacacgacgctcttccgatctggtgattatcactgtctgtctctcc

SEQ ID NO: 3077 - DNA, 103 bp, Artificial Sequence
  Description of Artificial Sequence: Synthetic polynucleotide
aatgatacggcgaccaccgagatctacactatagcctacactctttccctacacgacgctcttccgatctctcatattaacaagtaatctgtttctgagaagt

SEQ ID NO: 3078 - DNA, 97 bp, Artificial Sequence
  Description of Artificial Sequence: Synthetic primer
aatgatacggcgaccaccgagatctacactatagcctacactctttccctacacgacgctcttccgatctggagccaggcatttttcttatctcaac

SEQ ID NO: 3079 - DNA, 98 bp, Artificial Sequence
  Description of Artificial Sequence: Synthetic primer
aatgatacggcgaccaccgagatctacactatagcctacactctttccctacacgacgctcttccgatctatgttatttgagctagaaccagtgccag

SEQ ID NO: 3080 - DNA, 93 bp, Artificial Sequence
  Description of Artificial Sequence: Synthetic primer
aatgatacggcgaccaccgagatctacactatagcctacactctttccctacacgacgctcttccgatctgtcctctcgtttccttacatgca

SEQ ID NO: 3081 - DNA, 89 bp, Artificial Sequence
  Description of Artificial Sequence: Synthetic primer
aatgatacggcgaccaccgagatctacactatagcctacactctttccctacacgacgctcttccgatctgcatggacagggacggtgg

SEQ ID NO: 3082 - DNA, 89 bp, Artificial Sequence
  Description of Artificial Sequence: Synthetic primer
aatgatacggcgaccaccgagatctacactatagcctacactctttccctacacgacgctcttccgatctagaacccgctggcatcact

SEQ ID NO: 3083 - DNA, 90 bp, Artificial Sequence
  Description of Artificial Sequence: Synthetic primer
aatgatacggcgaccaccgagatctacactatagcctacactctttccctacacgacgctcttccgatctagtggcacatctgggtcccg

SEQ ID NO: 3084 - DNA, 100 bp, Artificial Sequence
  Description of Artificial Sequence: Synthetic polynucleotide
aatgatacggcgaccaccgagatctacactatagcctacactctttccctacacgacgctcttccgatctgaaagaagaaagaaaaggaaaagaaaagcc

SEQ ID NO: 3085 - DNA, 94 bp, Artificial Sequence
  Description of Artificial Sequence: Synthetic primer
aatgatacggcgaccaccgagatctacactatagcctacactctttccctacacgacgctcttccgatctccagaccggaagttgcagattcag

SEQ ID NO: 3086 - DNA, 91 bp, Artificial Sequence
  Description of Artificial Sequence: Synthetic primer
aatgatacggcgaccaccgagatctacactatagcctacactctttccctacacgacgctcttccgatctggagagcagcagggaggagag

SEQ ID NO: 3087 - DNA, 88 bp, Artificial Sequence
  Description of Artificial Sequence: Synthetic primer
aatgatacggcgaccaccgagatctacactatagcctacactctttccctacacgacgctcttccgatcttgggccttacctcggtgc

SEQ ID NO: 3088 - DNA, 90 bp, Artificial Sequence
  Description of Artificial Sequence: Synthetic primer
aatgatacggcgaccaccgagatctacactatagcctacactctttccctacacgacgctcttccgatctcgatgtgggtctgcggtgga

SEQ ID NO: 3089 - DNA, 90 bp, Artificial Sequence
  Description of Artificial Sequence: Synthetic primer
aatgatacggcgaccaccgagatctacactatagcctacactctttccctacacgacgctcttccgatcttctgttccgtggaggccctg

SEQ ID NO: 3090 - DNA, 91 bp, Artificial Sequence
  Description of Artificial Sequence: Synthetic primer
aatgatacggcgaccaccgagatctacactatagcctacactctttccctacacgacgctcttccgatctacctgcctcctgtttccaggg

SEQ ID NO: 3091 - DNA, 94 bp, Artificial Sequence
  Description of Artificial Sequence: Synthetic primer
aatgatacggcgaccaccgagatctacactatagcctacactctttccctacacgacgctcttccgatctccttggctttctgggtgagaaagg

SEQ ID NO: 3092 - DNA, 93 bp, Artificial Sequence
  Description of Artificial Sequence: Synthetic primer
aatgatacggcgaccaccgagatctacactatagcctacactctttccctacacgacgctcttccgatctccaatctcactgctcaaagaccc

SEQ ID NO: 3093 - DNA, 89 bp, Artificial Sequence
  Description of Artificial Sequence: Synthetic primer
aatgatacggcgaccaccgagatctacactatagcctacactctttccctacacgacgctcttccgatctttcctccgggccagcatcg

SEQ ID NO: 3094 - DNA, 101 bp, Artificial Sequence
  Description of Artificial Sequence: Synthetic polynucleotide
aatgatacggcgaccaccgagatctacactatagcctacactctttccctacacgacgctcttccgatctggagcaggaaaaaaattaggtaatgctaaaa

SEQ ID NO: 3095 - DNA, 97 bp, Artificial Sequence
  Description of Artificial Sequence: Synthetic primer
aatgatacggcgaccaccgagatctacactatagcctacactctttccctacacgacgctcttccgatcttgtatagaaggcatcatcaacaccctg

SEQ ID NO: 3096 - DNA, 98 bp, Artificial Sequence
  Description of Artificial Sequence: Synthetic primer
aatgatacggcgaccaccgagatctacactatagcctacactctttccctacacgacgctcttccgatcttaaaagacatctgctttctgccaaaatt

SEQ ID NO: 3097 - DNA, 100 bp, Artificial Sequence
  Description of Artificial Sequence: Synthetic polynucleotide
aatgatacggcgaccaccgagatctacactatagcctacactctttccctacacgacgctcttccgatctcataacagttatgattttgcagaaaacaga

SEQ ID NO: 3098 - DNA, 103 bp, Artificial Sequence
  Description of Artificial Sequence: Synthetic polynucleotide
aatgatacggcgaccaccgagatctacactatagcctacactctttccctacacgacgctcttccgatctcatggcattagcaaagactcaaaaaataaaaac

SEQ ID NO: 3099 - DNA, 93 bp, Artificial Sequence
  Description of Artificial Sequence: Synthetic primer
aatgatacggcgaccaccgagatctacactatagcctacactctttccctacacgacgctcttccgatctggtcctgcaccagtaatatgcat

SEQ ID NO: 3100 - DNA, 96 bp, Artificial Sequence
  Description of Artificial Sequence: Synthetic primer
aatgatacggcgaccaccgagatctacactatagcctacactctttccctacacgacgctcttccgatctagctcactgtattaaactccaggtac

SEQ ID NO: 3101 - DNA, 90 bp, Artificial Sequence
  Description of Artificial Sequence: Synthetic primer
aatgatacggcgaccaccgagatctacactatagcctacactctttccctacacgacgctcttccgatctcagcagccaggaacatgagc

SEQ ID NO: 3102 - DNA, 100 bp, Artificial Sequence
  Description of Artificial Sequence: Synthetic polynucleotide
aatgatacggcgaccaccgagatctacactatagcctacactctttccctacacgacgctcttccgatctgctaagcctaagaaaaaactaatcaacgaa

SEQ ID NO: 3103 - DNA, 90 bp, Artificial Sequence
  Description of Artificial Sequence: Synthetic primer
aatgatacggcgaccaccgagatctacactatagcctacactctttccctacacgacgctcttccgatctctgaagggctcgggaacctt

SEQ ID NO: 3104 - DNA, 100 bp, Artificial Sequence
  Description of Artificial Sequence: Synthetic polynucleotide
aatgatacggcgaccaccgagatctacactatagcctacactctttccctacacgacgctcttccgatcttctcttacttactggatttctttttatgca

SEQ ID NO: 3105 - DNA, 101 bp, Artificial Sequence
  Description of Artificial Sequence: Synthetic polynucleotide
aatgatacggcgaccaccgagatctacactatagcctacactctttccctacacgacgctcttccgatctataactatgcttcagtgaaagggtttttcaa

SEQ ID NO: 3106 - DNA, 94 bp, Artificial Sequence
  Description of Artificial Sequence: Synthetic primer
aatgatacggcgaccaccgagatctacactatagcctacactctttccctacacgacgctcttccgatctgttaccaagcagtggaattggcca

SEQ ID NO: 3107 - DNA, 90 bp, Artificial Sequence
  Description of Artificial Sequence: Synthetic primer
aatgatacggcgaccaccgagatctacactatagcctacactctttccctacacgacgctcttccgatctaagtccgggttcgaggtcgc

SEQ ID NO: 3108 - DNA, 94 bp, Artificial Sequence
  Description of Artificial Sequence: Synthetic primer
aatgatacggcgaccaccgagatctacactatagcctacactctttccctacacgacgctcttccgatctgccttgaacctgttttggcagata

SEQ ID NO: 3109 - DNA, 92 bp, Artificial Sequence
  Description of Artificial Sequence: Synthetic primer
aatgatacggcgaccaccgagatctacactatagcctacactctttccctacacgacgctcttccgatctcatacagtcggaggttcactgc

SEQ ID NO: 3110 - DNA, 90 bp, Artificial Sequence
  Description of Artificial Sequence: Synthetic primer
aatgatacggcgaccaccgagatctacactatagcctacactctttccctacacgacgctcttccgatctggctgcgtatgtcagcaagc

SEQ ID NO: 3111 - DNA, 96 bp, Artificial Sequence
  Description of Artificial Sequence: Synthetic primer
aatgatacggcgaccaccgagatctacactatagcctacactctttccctacacgacgctcttccgatctggtttcttaccagcttgttcatgtct

SEQ ID NO: 3112 - DNA, 103 bp, Artificial Sequence
  Description of Artificial Sequence: Synthetic polynucleotide
aatgatacggcgaccaccgagatctacactatagcctacactctttccctacacgacgctcttccgatctttaaactgagcttgttggaataaggatgttata

SEQ ID NO: 3113 - DNA, 92 bp, Artificial Sequence
  Description of Artificial Sequence: Synthetic primer
aatgatacggcgaccaccgagatctacactatagcctacactctttccctacacgacgctcttccgatctccctctggaagctctttccacc

SEQ ID NO: 3114 - DNA, 100 bp, Artificial Sequence
  Description of Artificial Sequence: Synthetic polynucleotide
aatgatacggcgaccaccgagatctacactatagcctacactctttccctacacgacgctcttccgatctggatatacattttgtttgttcgttttccat

SEQ ID NO: 3115 - DNA, 99 bp, Artificial Sequence
  Description of Artificial Sequence: Synthetic primer
aatgatacggcgaccaccgagatctacactatagcctacactctttccctacacgacgctcttccgatctcaacctaaccagaaaattccttggatttg

SEQ ID NO: 3116 - DNA, 100 bp, Artificial Sequence
  Description of Artificial Sequence: Synthetic polynucleotide
aatgatacggcgaccaccgagatctacactatagcctacactctttccctacacgacgctcttccgatctggcactttacttactttaactggaaattac

SEQ ID NO: 3117 - DNA, 101 bp, Artificial Sequence
  Description of Artificial Sequence: Synthetic polynucleotide
aatgatacggcgaccaccgagatctacactatagcctacactctttccctacacgacgctcttccgatctaaccattgagttatatccttttgatttgtgg

SEQ ID NO: 3118 - DNA, 99 bp, Artificial Sequence
  Description of Artificial Sequence: Synthetic primer
aatgatacggcgaccaccgagatctacactatagcctacactctttccctacacgacgctcttccgatctcagtgcaggtgattaaattgaatccctct

SEQ ID NO: 3119 - DNA, 93 bp, Artificial Sequence
  Description of Artificial Sequence: Synthetic primer
aatgatacggcgaccaccgagatctacactatagcctacactctttccctacacgacgctcttccgatctgttgctatggatgttgccaagct

SEQ ID NO: 3120 - DNA, 95 bp, Artificial Sequence
  Description of Artificial Sequence: Synthetic primer
aatgatacggcgaccaccgagatctacactatagcctacactctttccctacacgacgctcttccgatcttttgccattgttagcattcctgcag

SEQ ID NO: 3121 - DNA, 99 bp, Artificial Sequence
  Description of Artificial Sequence: Synthetic primer
aatgatacggcgaccaccgagatctacactatagcctacactctttccctacacgacgctcttccgatctgctaaatgctgacttttctttatttgtca

SEQ ID NO: 3122 - DNA, 101 bp, Artificial Sequence
  Description of Artificial Sequence: Synthetic polynucleotide
aatgatacggcgaccaccgagatctacactatagcctacactctttccctacacgacgctcttccgatctatagccgtctttaacaagctctttctttctc

SEQ ID NO: 3123 - DNA, 102 bp, Artificial Sequence
  Description of Artificial Sequence: Synthetic polynucleotide
aatgatacggcgaccaccgagatctacactatagcctacactctttccctacacgacgctcttccgatctcccattaaatgaggttttactgttgttcttta

SEQ ID NO: 3124 - DNA, 95 bp, Artificial Sequence
  Description of Artificial Sequence: Synthetic primer
aatgatacggcgaccaccgagatctacactatagcctacactctttccctacacgacgctcttccgatctcgcagtgctaaccaagttctttctt

SEQ ID NO: 3125 - DNA, 98 bp, Artificial Sequence
  Description of Artificial Sequence: Synthetic primer
aatgatacggcgaccaccgagatctacactatagcctacactctttccctacacgacgctcttccgatctgaagttaatgtctccaccactggatttc

SEQ ID NO: 3126 - DNA, 105 bp, Artificial Sequence
  Description of Artificial Sequence: Synthetic polynucleotide
aatgatacggcgaccaccgagatctacactatagcctacactctttccctacacgacgctcttccgatcttagatgcttagtttatgcttttctaactctctttg

SEQ ID NO: 3127 - DNA, 99 bp, Artificial Sequence
  Description of Artificial Sequence: Synthetic primer
aatgatacggcgaccaccgagatctacactatagcctacactctttccctacacgacgctcttccgatctattctatttcagccacgggtaataatttt

SEQ ID NO: 3128 - DNA, 96 bp, Artificial Sequence
  Description of Artificial Sequence: Synthetic primer
aatgatacggcgaccaccgagatctacactatagcctacactctttccctacacgacgctcttccgatcttcacctcatctgtcctgtttcttgtt

SEQ ID NO: 3129 - DNA, 100 bp, Artificial Sequence
  Description of Artificial Sequence: Synthetic polynucleotide
aatgatacggcgaccaccgagatctacactatagcctacactctttccctacacgacgctcttccgatctctatgtccatgtgaacgctacttatgtgaa

SEQ ID NO: 3130 - DNA, 89 bp, Artificial Sequence
  Description of Artificial Sequence: Synthetic primer
aatgatacggcgaccaccgagatctacactatagcctacactctttccctacacgacgctcttccgatcttccttggctcttctggcgc

SEQ ID NO: 3131 - DNA, 103 bp, Artificial Sequence
  Description of Artificial Sequence: Synthetic polynucleotide
aatgatacggcgaccaccgagatctacactatagcctacactctttccctacacgacgctcttccgatctgcagactgataaattattttctgtttgatttgc

SEQ ID NO: 3132 - DNA, 100 bp, Artificial Sequence
  Description of Artificial Sequence: Synthetic polynucleotide
aatgatacggcgaccaccgagatctacactatagcctacactctttccctacacgacgctcttccgatctcaaagagatttggaaaaatgagtaacatga

SEQ ID NO: 3133 - DNA, 97 bp, Artificial Sequence
  Description of Artificial Sequence: Synthetic primer
aatgatacggcgaccaccgagatctacactatagcctacactctttccctacacgacgctcttccgatctcagcagtgagtttttctttcagtctat

SEQ ID NO: 3134 - DNA, 104 bp, Artificial Sequence
  Description of Artificial Sequence: Synthetic polynucleotide
aatgatacggcgaccaccgagatctacactatagcctacactctttccctacacgacgctcttccgatctccttgggattagtatctatctctctactggatat

SEQ ID NO: 3135 - DNA, 99 bp, Artificial Sequence
  Description of Artificial Sequence: Synthetic primer
aatgatacggcgaccaccgagatctacactatagcctacactctttccctacacgacgctcttccgatctccaggacatcttgggttttattttcaagt

SEQ ID NO: 3136 - DNA, 98 bp, Artificial Sequence
  Description of Artificial Sequence: Synthetic primer
aatgatacggcgaccaccgagatctacactatagcctacactctttccctacacgacgctcttccgatctagtgtgtgtttttggcaactcttttctt

SEQ ID NO: 3137 - DNA, 95 bp, Artificial Sequence
  Description of Artificial Sequence: Synthetic primer
aatgatacggcgaccaccgagatctacactatagcctacactctttccctacacgacgctcttccgatctttgtttatcagcaaggagagacagt

SEQ ID NO: 3138 - DNA, 99 bp, Artificial Sequence
  Description of Artificial Sequence: Synthetic primer
aatgatacggcgaccaccgagatctacactatagcctacactctttccctacacgacgctcttccgatcttagtttatgggaaggaaccttgtgttttt

SEQ ID NO: 3139 - DNA, 100 bp, Artificial Sequence
  Description of Artificial Sequence: Synthetic polynucleotide
aatgatacggcgaccaccgagatctacactatagcctacactctttccctacacgacgctcttccgatctacagttttgaactggttgctttctttttat

SEQ ID NO: 3140 - DNA, 104 bp, Artificial Sequence
  Description of Artificial Sequence: Synthetic polynucleotide
aatgatacggcgaccaccgagatctacactatagcctacactctttccctacacgacgctcttccgatctatctaaggtaattgttctctcttattttcctgac

SEQ ID NO: 3141 - DNA, 101 bp, Artificial Sequence
  Description of Artificial Sequence: Synthetic polynucleotide
aatgatacggcgaccaccgagatctacactatagcctacactctttccctacacgacgctcttccgatctctatacttcttattctgagtctctccactat

SEQ ID NO: 3142 - DNA, 94 bp, Artificial Sequence
  Description of Artificial Sequence: Synthetic primer
aatgatacggcgaccaccgagatctacactatagcctacactctttccctacacgacgctcttccgatctggctaggcagcaagatgaggagat

SEQ ID NO: 3143 - DNA, 100 bp, Artificial Sequence
  Description of Artificial Sequence: Synthetic polynucleotide
aatgatacggcgaccaccgagatctacactatagcctacactctttccctacacgacgctcttccgatctaaacaagaataataatgatctgcacttcct

SEQ ID NO: 3144 - DNA, 103 bp, Artificial Sequence
  Description of Artificial Sequence: Synthetic polynucleotide
aatgatacggcgaccaccgagatctacactatagcctacactctttccctacacgacgctcttccgatctgggttggtaggattctattacttacctgttttt

SEQ ID NO: 3145 - DNA, 98 bp, Artificial Sequence
  Description of Artificial Sequence: Synthetic primer
aatgatacggcgaccaccgagatctacactatagcctacactctttccctacacgacgctcttccgatctttcagcttttccttaaagtcacttcatt

SEQ ID NO: 3146 - DNA, 95 bp, Artificial Sequence
  Description of Artificial Sequence: Synthetic primer
aatgatacggcgaccaccgagatctacactatagcctacactctttccctacacgacgctcttccgatctctccttcatgttcttgcttcttcct

SEQ ID NO: 3147 - DNA, 96 bp, Artificial Sequence
  Description of Artificial Sequence: Synthetic primer
aatgatacggcgaccaccgagatctacactatagcctacactctttccctacacgacgctcttccgatcttttcttgttcccttgtcctttttcct

SEQ ID NO: 3148 - DNA, 100 bp, Artificial Sequence
  Description of Artificial Sequence: Synthetic polynucleotide
aatgatacggcgaccaccgagatctacactatagcctacactctttccctacacgacgctcttccgatctaggtattgaatttctttggaccaggtgaat

SEQ ID NO: 3149 - DNA, 95 bp, Artificial Sequence
  Description of Artificial Sequence: Synthetic primer
aatgatacggcgaccaccgagatctacactatagcctacactctttccctacacgacgctcttccgatctagggaggcttatgacatctaatgtg

SEQ ID NO: 3150 - DNA, 88 bp, Artificial Sequence
  Description of Artificial Sequence: Synthetic primer
aatgatacggcgaccaccgagatctacactatagcctacactctttccctacacgacgctcttccgatcttgggctaaggcaggcaca

SEQ ID NO: 3151 - DNA, 92 bp, Artificial Sequence
  Description of Artificial Sequence: Synthetic primer
aatgatacggcgaccaccgagatctacactatagcctacactctttccctacacgacgctcttccgatctccttagatgtctccttgctggc

SEQ ID NO: 3152 - DNA, 91 bp, Artificial Sequence
  Description of Artificial Sequence: Synthetic primer
aatgatacggcgaccaccgagatctacactatagcctacactctttccctacacgacgctcttccgatcttggctgtgtaggagggacctc

SEQ ID NO: 3153 - DNA, 90 bp, Artificial Sequence
  Description of Artificial Sequence: Synthetic primer
aatgatacggcgaccaccgagatctacactatagcctacactctttccctacacgacgctcttccgatctctgatgtgccctgtcttgcc

SEQ ID NO: 3154 - DNA, 91 bp, Artificial Sequence
  Description of Artificial Sequence: Synthetic primer
aatgatacggcgaccaccgagatctacactatagcctacactctttccctacacgacgctcttccgatctctctgctctggaccagtctcc

SEQ ID NO: 3155 - DNA, 93 bp, Artificial Sequence
  Description of Artificial Sequence: Synthetic primer
aatgatacggcgaccaccgagatctacactatagcctacactctttccctacacgacgctcttccgatcttaagggttggaggctctctcagc

SEQ ID NO: 3156 - DNA, 102 bp, Artificial Sequence
  Description of Artificial Sequence: Synthetic polynucleotide
aatgatacggcgaccaccgagatctacactatagcctacactctttccctacacgacgctcttccgatctattatctgaaatctgaacaccctatacagtag

SEQ ID NO: 3157 - DNA, 94 bp, Artificial Sequence
  Description of Artificial Sequence: Synthetic primer
aatgatacggcgaccaccgagatctacactatagcctacactctttccctacacgacgctcttccgatctggcctgattcaatgactctgtggg

SEQ ID NO: 3158 - DNA, 91 bp, Artificial Sequence
  Description of Artificial Sequence: Synthetic primer
aatgatacggcgaccaccgagatctacactatagcctacactctttccctacacgacgctcttccgatctgctccctgctgacatccctgt

SEQ ID NO: 3159 - DNA, 90 bp, Artificial Sequence
  Description of Artificial Sequence: Synthetic primer
aatgatacggcgaccaccgagatctacactatagcctacactctttccctacacgacgctcttccgatctacgctgggctatcgaagccc

SEQ ID NO: 3160 - DNA, 95 bp, Artificial Sequence
  Description of Artificial Sequence: Synthetic primer
aatgatacggcgaccaccgagatctacactatagcctacactctttccctacacgacgctcttccgatctttgtctcctagcctggatctccttg

SEQ ID NO: 3161 - DNA, 94 bp, Artificial Sequence
  Description of Artificial Sequence: Synthetic primer
aatgatacggcgaccaccgagatctacactatagcctacactctttccctacacgacgctcttccgatctcagtctgcttctcttccttctccc

SEQ ID NO: 3162 - DNA, 92 bp, Artificial Sequence
  Description of Artificial Sequence: Synthetic primer
aatgatacggcgaccaccgagatctacactatagcctacactctttccctacacgacgctcttccgatctcctcagagaggactcctttgcc

SEQ ID NO: 3163 - DNA, 92 bp, Artificial Sequence
  Description of Artificial Sequence: Synthetic primer
aatgatacggcgaccaccgagatctacactatagcctacactctttccctacacgacgctcttccgatcttctcctacctaagtgcgtgccg

SEQ ID NO: 3164 - DNA, 100 bp, Artificial Sequence
  Description of Artificial Sequence: Synthetic polynucleotide
aatgatacggcgaccaccgagatctacactatagcctacactctttccctacacgacgctcttccgatctttcagtgttatttttctccttgttagagtt

SEQ ID NO: 3165 - DNA, 101 bp, Artificial Sequence
  Description of Artificial Sequence: Synthetic polynucleotide
aatgatacggcgaccaccgagatctacactatagcctacactctttccctacacgacgctcttccgatctaggtggaactcaaaagttgaagtagtatttt

SEQ ID NO: 3166 - DNA, 99 bp, Artificial Sequence
  Description of Artificial Sequence: Synthetic primer
aatgatacggcgaccaccgagatctacactatagcctacactctttccctacacgacgctcttccgatcttgatttggcttatgtgtttgcctgtaatg

SEQ ID NO: 3167 - DNA, 100 bp, Artificial Sequence
  Description of Artificial Sequence: Synthetic polynucleotide
aatgatacggcgaccaccgagatctacactatagcctacactctttccctacacgacgctcttccgatcttttttttctgacttcttgctgcttgagttt

SEQ ID NO: 3168 - DNA, 97 bp, Artificial Sequence
  Description of Artificial Sequence: Synthetic primer
aatgatacggcgaccaccgagatctacactatagcctacactctttccctacacgacgctcttccgatctgtttggtgatagaacagctcttgttca

SEQ ID NO: 3169 - DNA, 97 bp, Artificial Sequence
  Description of Artificial Sequence: Synthetic primer
aatgatacggcgaccaccgagatctacactatagcctacactctttccctacacgacgctcttccgatcttgctttcaattcttgtgtctactccca

SEQ ID NO: 3170 - DNA, 99 bp, Artificial Sequence
  Description of Artificial Sequence: Synthetic primer
aatgatacggcgaccaccgagatctacactatagcctacactctttccctacacgacgctcttccgatctgggtcagggacagtgattaagataaattt

SEQ ID NO: 3171 - DNA, 100 bp, Artificial Sequence
  Description of Artificial Sequence: Synthetic polynucleotide
aatgatacggcgaccaccgagatctacactatagcctacactctttccctacacgacgctcttccgatctgaggaaatccagatagaatgggttttaatt

SEQ ID NO: 3172 - DNA, 99 bp, Artificial Sequence
  Description of Artificial Sequence: Synthetic primer
aatgatacggcgaccaccgagatctacactatagcctacactctttccctacacgacgctcttccgatctccattttaatatggtcctatctccttggt

SEQ ID NO: 3173 - DNA, 102 bp, Artificial Sequence
  Description of Artificial Sequence: Synthetic polynucleotide
aatgatacggcgaccaccgagatctacactatagcctacactctttccctacacgacgctcttccgatcttctctcggtgtatttctctacttacctgtaat

SEQ ID NO: 3174 - DNA, 99 bp, Artificial Sequence
  Description of Artificial Sequence: Synthetic primer
aatgatacggcgaccaccgagatctacactatagcctacactctttccctacacgacgctcttccgatctatttattgatgtctatgaagtgttgtggt

SEQ ID NO: 3175 - DNA, 98 bp, Artificial Sequence
  Description of Artificial Sequence: Synthetic primer
aatgatacggcgaccaccgagatctacactatagcctacactctttccctacacgacgctcttccgatctagcatttactaaagtacaaaagcctcag

SEQ ID NO: 3176 - DNA, 102 bp, Artificial Sequence
  Description of Artificial Sequence: Synthetic polynucleotide
aatgatacggcgaccaccgagatctacactatagcctacactctttccctacacgacgctcttccgatctctgattgcttattttaacaaagtcactttgag

SEQ ID NO: 3177 - DNA, 103 bp, Artificial Sequence
  Description of Artificial Sequence: Synthetic polynucleotide
aatgatacggcgaccaccgagatctacactatagcctacactctttccctacacgacgctcttccgatcttgctcagattttatgtcccttttaagtaaacac

SEQ ID NO: 3178 - DNA, 94 bp, Artificial Sequence
  Description of Artificial Sequence: Synthetic primer
aatgatacggcgaccaccgagatctacactatagcctacactctttccctacacgacgctcttccgatcttcttaatgagctagtcactggtgc

SEQ ID NO: 3179 - DNA, 90 bp, Artificial Sequence
  Description of Artificial Sequence: Synthetic primer
aatgatacggcgaccaccgagatctacactatagcctacactctttccctacacgacgctcttccgatctgagagcctttgcgacctccc

SEQ ID NO: 3180 - DNA, 88 bp, Artificial Sequence
  Description of Artificial Sequence: Synthetic primer
aatgatacggcgaccaccgagatctacactatagcctacactctttccctacacgacgctcttccgatctagctcagctcccaggcac

SEQ ID NO: 3181 - DNA, 93 bp, Artificial Sequence
  Description of Artificial Sequence: Synthetic primer
aatgatacggcgaccaccgagatctacactatagcctacactctttccctacacgacgctcttccgatcttcccatttggaagcagctcgttc

SEQ ID NO: 3182 - DNA, 95 bp, Artificial Sequence
  Description of Artificial Sequence: Synthetic primer
aatgatacggcgaccaccgagatctacactatagcctacactctttccctacacgacgctcttccgatctaagtctgcctacagtgtcagaggag

SEQ ID NO: 3183 - DNA, 102 bp, Artificial Sequence
  Description of Artificial Sequence: Synthetic polynucleotide
aatgatacggcgaccaccgagatctacactatagcctacactctttccctacacgacgctcttccgatctaactacaatggagaaagaagactaaaaaaacc

SEQ ID NO: 3184 - DNA, 90 bp, Artificial Sequence
  Description of Artificial Sequence: Synthetic primer
aatgatacggcgaccaccgagatctacactatagcctacactctttccctacacgacgctcttccgatctgttccaggagagcgcaggtc

SEQ ID NO: 3185 - DNA, 91 bp, Artificial Sequence
  Description of Artificial Sequence: Synthetic primer
aatgatacggcgaccaccgagatctacactatagcctacactctttccctacacgacgctcttccgatctcactagctctcgtggccgcat

SEQ ID NO: 3186 - DNA, 100 bp, Artificial Sequence
  Description of Artificial Sequence: Synthetic polynucleotide
aatgatacggcgaccaccgagatctacactatagcctacactctttccctacacgacgctcttccgatctccagaagacttctcaaattgttgccatttc

SEQ ID NO: 3187 - DNA, 91 bp, Artificial Sequence
  Description of Artificial Sequence: Synthetic primer
aatgatacggcgaccaccgagatctacactatagcctacactctttccctacacgacgctcttccgatcttctcagccagtgtaggaggga

SEQ ID NO: 3188 - DNA, 105 bp, Artificial Sequence
  Description of Artificial Sequence: Synthetic polynucleotide
aatgatacggcgaccaccgagatctacactatagcctacactctttccctacacgacgctcttccgatcttcatagacagtaaaacagaaaggactataatgaca

SEQ ID NO: 3189 - DNA, 97 bp, Artificial Sequence
  Description of Artificial Sequence: Synthetic primer
aatgatacggcgaccaccgagatctacactatagcctacactctttccctacacgacgctcttccgatctcagggttatgtcctttcgtgtttttta

SEQ ID NO: 3190 - DNA, 88 bp, Artificial Sequence
  Description of Artificial Sequence: Synthetic primer
aatgatacggcgaccaccgagatctacactatagcctacactctttccctacacgacgctcttccgatcttgcgcccaccagctaagg

SEQ ID NO: 3191 - DNA, 94 bp, Artificial Sequence
  Description of Artificial Sequence: Synthetic primer
aatgatacggcgaccaccgagatctacactatagcctacactctttccctacacgacgctcttccgatctccagtggttagatgagaaactgcc

SEQ ID NO: 3192 - DNA, 95 bp, Artificial Sequence
  Description of Artificial Sequence: Synthetic primer
aatgatacggcgaccaccgagatctacactatagcctacactctttccctacacgacgctcttccgatctcacacagaagagagacttggagcca

SEQ ID NO: 3193 - DNA, 93 bp, Artificial Sequence
  Description of Artificial Sequence: Synthetic primer
aatgatacggcgaccaccgagatctacactatagcctacactctttccctacacgacgctcttccgatctcgtgtgacttctaggtcttgcca

SEQ ID NO: 3194 - DNA, 98 bp, Artificial Sequence
  Description of Artificial Sequence: Synthetic primer
aatgatacggcgaccaccgagatctacactatagcctacactctttccctacacgacgctcttccgatctggttgttaataaggaagaagggaagggt

SEQ ID NO: 3195 - DNA, 91 bp, Artificial Sequence
  Description of Artificial Sequence: Synthetic primer
aatgatacggcgaccaccgagatctacactatagcctacactctttccctacacgacgctcttccgatcttctcacaggtggcctgcttct

SEQ ID NO: 3196 - DNA, 94 bp, Artificial Sequence
  Description of Artificial Sequence: Synthetic primer
aatgatacggcgaccaccgagatctacactatagcctacactctttccctacacgacgctcttccgatctgggatgacagggctggaatatgac

SEQ ID NO: 3197 - DNA, 95 bp, Artificial Sequence
  Description of Artificial Sequence: Synthetic primer
aatgatacggcgaccaccgagatctacactatagcctacactctttccctacacgacgctcttccgatctcagattaggcgagcattctggagaa

SEQ ID NO: 3198 - DNA, 90 bp, Artificial Sequence
  Description of Artificial Sequence: Synthetic primer
aatgatacggcgaccaccgagatctacactatagcctacactctttccctacacgacgctcttccgatctctcaccagcctgccactctt

SEQ ID NO: 3199 - DNA, 90 bp, Artificial Sequence
  Description of Artificial Sequence: Synthetic primer
aatgatacggcgaccaccgagatctacactatagcctacactctttccctacacgacgctcttccgatctgggtaggtgggtgaactggg

SEQ ID NO: 3200 - DNA, 98 bp, Artificial Sequence
  Description of Artificial Sequence: Synthetic primer
aatgatacggcgaccaccgagatctacactatagcctacactctttccctacacgacgctcttccgatctaataagcctcaaaaatgacaatgtgcag

SEQ ID NO: 3201 - DNA, 101 bp, Artificial Sequence
  Description of Artificial Sequence: Synthetic polynucleotide
aatgatacggcgaccaccgagatctacactatagcctacactctttccctacacgacgctcttccgatctttagaagcactacaatcttttcctcactgag

SEQ ID NO: 3202 - DNA, 90 bp, Artificial Sequence
  Description of Artificial Sequence: Synthetic primer
aatgatacggcgaccaccgagatctacactatagcctacactctttccctacacgacgctcttccgatctgggtgcctgtgagggaagct

SEQ ID NO: 3203 - DNA, 94 bp, Artificial Sequence
  Description of Artificial Sequence: Synthetic primer
aatgatacggcgaccaccgagatctacactatagcctacactctttccctacacgacgctcttccgatctacatgccatcattctaggaagctc

SEQ ID NO: 3204 - DNA, 95 bp, Artificial Sequence
  Description of Artificial Sequence: Synthetic primer
aatgatacggcgaccaccgagatctacactatagcctacactctttccctacacgacgctcttccgatcttgcttttccaaaaagaatgaggtgc

SEQ ID NO: 3205 - DNA, 96 bp, Artificial Sequence
  Description of Artificial Sequence: Synthetic primer
aatgatacggcgaccaccgagatctacactatagcctacactctttccctacacgacgctcttccgatctttgcatgaaggcagcaattaaaaagg

SEQ ID NO: 3206 - DNA, 96 bp, Artificial Sequence
  Description of Artificial Sequence: Synthetic primer
aatgatacggcgaccaccgagatctacactatagcctacactctttccctacacgacgctcttccgatcttctcaccttgtcactgtgttccatga

SEQ ID NO: 3207 - DNA, 91 bp, Artificial Sequence
  Description of Artificial Sequence: Synthetic primer
aatgatacggcgaccaccgagatctacactatagcctacactctttccctacacgacgctcttccgatctatcttctccacccgccctgac

SEQ ID NO: 3208 - DNA, 94 bp, Artificial Sequence
  Description of Artificial Sequence: Synthetic primer
aatgatacggcgaccaccgagatctacactatagcctacactctttccctacacgacgctcttccgatcttcctttcccagtcacctgaaacaa

SEQ ID NO: 3209 - DNA, 100 bp, Artificial Sequence
  Description of Artificial Sequence: Synthetic polynucleotide
aatgatacggcgaccaccgagatctacactatagcctacactctttccctacacgacgctcttccgatcttaaagacaacagggacttcagaacagaaaa

SEQ ID NO: 3210 - DNA, 93 bp, Artificial Sequence
  Description of Artificial Sequence: Synthetic primer
aatgatacggcgaccaccgagatctacactatagcctacactctttccctacacgacgctcttccgatctcacctgtctgtccagactcccat

SEQ ID NO: 3211 - DNA, 91 bp, Artificial Sequence
  Description of Artificial Sequence: Synthetic primer
aatgatacggcgaccaccgagatctacactatagcctacactctttccctacacgacgctcttccgatctgtcccaaagaggaggtgctca

SEQ ID NO: 3212 - DNA, 98 bp, Artificial Sequence
  Description of Artificial Sequence: Synthetic primer
aatgatacggcgaccaccgagatctacactatagcctacactctttccctacacgacgctcttccgatctagaggaaatcagaaaatctctctggagg

SEQ ID NO: 3213 - DNA, 98 bp, Artificial Sequence
  Description of Artificial Sequence: Synthetic primer
aatgatacggcgaccaccgagatctacactatagcctacactctttccctacacgacgctcttccgatctaacatggaagaggccaaagcattaactt

SEQ ID NO: 3214 - DNA, 95 bp, Artificial Sequence
  Description of Artificial Sequence: Synthetic primer
aatgatacggcgaccaccgagatctacactatagcctacactctttccctacacgacgctcttccgatctatgtgtggtgcagaggagaaagaga

SEQ ID NO: 3215 - DNA, 89 bp, Artificial Sequence
  Description of Artificial Sequence: Synthetic primer
aatgatacggcgaccaccgagatctacactatagcctacactctttccctacacgacgctcttccgatctatccgcatcagggccacca

SEQ ID NO: 3216 - DNA, 97 bp, Artificial Sequence
  Description of Artificial Sequence: Synthetic primer
aatgatacggcgaccaccgagatctacactatagcctacactctttccctacacgacgctcttccgatctgagaacttggcaagtctttcatggcta

SEQ ID NO: 3217 - DNA, 94 bp, Artificial Sequence
  Description of Artificial Sequence: Synthetic primer
aatgatacggcgaccaccgagatctacactatagcctacactctttccctacacgacgctcttccgatcttaaagaccaagtttgccacgtccc

SEQ ID NO: 3218 - DNA, 94 bp, Artificial Sequence
  Description of Artificial Sequence: Synthetic primer
aatgatacggcgaccaccgagatctacactatagcctacactctttccctacacgacgctcttccgatcttctgtcttgctcaatcaggaagca

SEQ ID NO: 3219 - DNA, 96 bp, Artificial Sequence
  Description of Artificial Sequence: Synthetic primer
aatgatacggcgaccaccgagatctacactatagcctacactctttccctacacgacgctcttccgatctatctccgctatggaaaaagtagctgc

SEQ ID NO: 3220 - DNA, 89 bp, Artificial Sequence
  Description of Artificial Sequence: Synthetic primer
aatgatacggcgaccaccgagatctacactatagcctacactctttccctacacgacgctcttccgatctagcaccagcctctcggttt

SEQ ID NO: 3221 - DNA, 90 bp, Artificial Sequence
  Description of Artificial Sequence: Synthetic primer
aatgatacggcgaccaccgagatctacactatagcctacactctttccctacacgacgctcttccgatcttcttccctgcctgtgggtct

SEQ ID NO: 3222 - DNA, 94 bp, Artificial Sequence
  Description of Artificial Sequence: Synthetic primer
aatgatacggcgaccaccgagatctacactatagcctacactctttccctacacgacgctcttccgatctctagattccttctgtctggcaagc

SEQ ID NO: 3223 - DNA, 94 bp, Artificial Sequence
  Description of Artificial Sequence: Synthetic primer
aatgatacggcgaccaccgagatctacactatagcctacactctttccctacacgacgctcttccgatctgcatctctcactatcttggcaaga

SEQ ID NO: 3224 - DNA, 90 bp, Artificial Sequence
  Description of Artificial Sequence: Synthetic primer
aatgatacggcgaccaccgagatctacactatagcctacactctttccctacacgacgctcttccgatctcacgctgatacagggcaagc

SEQ ID NO: 3225 - DNA, 94 bp, Artificial Sequence
  Description of Artificial Sequence: Synthetic primer
aatgatacggcgaccaccgagatctacactatagcctacactctttccctacacgacgctcttccgatctaaccaaatggagtggaaggtgaaa

SEQ ID NO: 3226 - DNA, 94 bp, Artificial Sequence
  Description of Artificial Sequence: Synthetic primer
aatgatacggcgaccaccgagatctacactatagcctacactctttccctacacgacgctcttccgatctaccctgagatgggtaatgatgtct

SEQ ID NO: 3227 - DNA, 93 bp, Artificial Sequence
  Description of Artificial Sequence: Synthetic primer
aatgatacggcgaccaccgagatctacactatagcctacactctttccctacacgacgctcttccgatctgtacagcctggaaactggtgaag

SEQ ID NO: 3228 - DNA, 91 bp, Artificial Sequence
  Description of Artificial Sequence: Synthetic primer
aatgatacggcgaccaccgagatctacactatagcctacactctttccctacacgacgctcttccgatctcgctcacagaatggtacacgg

SEQ ID NO: 3229 - DNA, 95 bp, Artificial Sequence
  Description of Artificial Sequence: Synthetic primer
aatgatacggcgaccaccgagatctacactatagcctacactctttccctacacgacgctcttccgatctgatgtgctttgctagtggtgggaat

SEQ ID NO: 3230 - DNA, 93 bp, Artificial Sequence
  Description of Artificial Sequence: Synthetic primer
aatgatacggcgaccaccgagatctacactatagcctacactctttccctacacgacgctcttccgatctgctgtgctcctccctgtagacac

SEQ ID NO: 3231 - DNA, 96 bp, Artificial Sequence
  Description of Artificial Sequence: Synthetic primer
aatgatacggcgaccaccgagatctacactatagcctacactctttccctacacgacgctcttccgatctgtgagtgtgttgtttttgtgaccaga

SEQ ID NO: 3232 - DNA, 93 bp, Artificial Sequence
  Description of Artificial Sequence: Synthetic primer
aatgatacggcgaccaccgagatctacactatagcctacactctttccctacacgacgctcttccgatctgcccacacatcccacaatgactg

SEQ ID NO: 3233 - DNA, 98 bp, Artificial Sequence
  Description of Artificial Sequence: Synthetic primer
aatgatacggcgaccaccgagatctacactatagcctacactctttccctacacgacgctcttccgatctttgcatgtttctcagtgccattaaatat

SEQ ID NO: 3234 - DNA, 97 bp, Artificial Sequence
  Description of Artificial Sequence: Synthetic primer
aatgatacggcgaccaccgagatctacactatagcctacactctttccctacacgacgctcttccgatctagcaactagctggcagtctctatttaa

SEQ ID NO: 3235 - DNA, 98 bp, Artificial Sequence
  Description of Artificial Sequence: Synthetic primer
aatgatacggcgaccaccgagatctacactatagcctacactctttccctacacgacgctcttccgatctgatgtttcttttgcagaaaatcactgca

SEQ ID NO: 3236 - DNA, 100 bp, Artificial Sequence
  Description of Artificial Sequence: Synthetic polynucleotide
aatgatacggcgaccaccgagatctacactatagcctacactctttccctacacgacgctcttccgatctgagttgacaattcataatgcagaaaacata

SEQ ID NO: 3237 - DNA, 99 bp, Artificial Sequence
  Description of Artificial Sequence: Synthetic primer
aatgatacggcgaccaccgagatctacactatagcctacactctttccctacacgacgctcttccgatctatggtgattaccttggtctttctaatgtt

SEQ ID NO: 3238 - DNA, 93 bp, Artificial Sequence
  Description of Artificial Sequence: Synthetic primer
aatgatacggcgaccaccgagatctacactatagcctacactctttccctacacgacgctcttccgatcttcaactgccaagtgtgaatgtgc

SEQ ID NO: 3239 - DNA, 103 bp, Artificial Sequence
  Description of Artificial Sequence: Synthetic polynucleotide
aatgatacggcgaccaccgagatctacactatagcctacactctttccctacacgacgctcttccgatctaacctactggttattctagtttaagaaagtgat

SEQ ID NO: 3240 - DNA, 102 bp, Artificial Sequence
  Description of Artificial Sequence: Synthetic polynucleotide
aatgatacggcgaccaccgagatctacactatagcctacactctttccctacacgacgctcttccgatctaaaatctcagagctactcttaaagacagacta

SEQ ID NO: 3241 - DNA, 103 bp, Artificial Sequence
  Description of Artificial Sequence: Synthetic polynucleotide
aatgatacggcgaccaccgagatctacactatagcctacactctttccctacacgacgctcttccgatctgtagccattattcaaaatgtgaactgtaagaaa

SEQ ID NO: 3242 - DNA, 100 bp, Artificial Sequence
  Description of Artificial Sequence: Synthetic polynucleotide
aatgatacggcgaccaccgagatctacactatagcctacactctttccctacacgacgctcttccgatctaagattccttcacaaatcctataagaacat

SEQ ID NO: 3243 - DNA, 98 bp, Artificial Sequence
  Description of Artificial Sequence: Synthetic primer
aatgatacggcgaccaccgagatctacactatagcctacactctttccctacacgacgctcttccgatctcctcactacttttcaaagaaaccatgta

SEQ ID NO: 3244 - DNA, 103 bp, Artificial Sequence
  Description of Artificial Sequence: Synthetic polynucleotide
aatgatacggcgaccaccgagatctacactatagcctacactctttccctacacgacgctcttccgatctgaaggtgaataattcttcaactaaagtagatct

SEQ ID NO: 3245 - DNA, 104 bp, Artificial Sequence
  Description of Artificial Sequence: Synthetic polynucleotide
aatgatacggcgaccaccgagatctacactatagcctacactctttccctacacgacgctcttccgatctggccttaaacctatgagatgattagttattatag

SEQ ID NO: 3246 - DNA, 102 bp, Artificial Sequence
  Description of Artificial Sequence: Synthetic polynucleotide
aatgatacggcgaccaccgagatctacactatagcctacactctttccctacacgacgctcttccgatctaagatcaatgaagtcatccaaaaattgttctg

SEQ ID NO: 3247 - DNA, 95 bp, Artificial Sequence
  Description of Artificial Sequence: Synthetic primer
aatgatacggcgaccaccgagatctacactatagcctacactctttccctacacgacgctcttccgatctagaaacagatttgggaagcctcagc

SEQ ID NO: 3248 - DNA, 103 bp, Artificial Sequence
  Description of Artificial Sequence: Synthetic polynucleotide
aatgatacggcgaccaccgagatctacactatagcctacactctttccctacacgacgctcttccgatctacacatggacataaacagtaaaataaaactgtc

SEQ ID NO: 3249 - DNA, 99 bp, Artificial Sequence
  Description of Artificial Sequence: Synthetic primer
aatgatacggcgaccaccgagatctacactatagcctacactctttccctacacgacgctcttccgatctccaaaattccaacaaactctaagaaaaca

SEQ ID NO: 3250 - DNA, 98 bp, Artificial Sequence
  Description of Artificial Sequence: Synthetic primer
aatgatacggcgaccaccgagatctacactatagcctacactctttccctacacgacgctcttccgatcttaccatacacaagtaatcactcactcaa

SEQ ID NO: 3251 - DNA, 99 bp, Artificial Sequence
  Description of Artificial Sequence: Synthetic primer
aatgatacggcgaccaccgagatctacactatagcctacactctttccctacacgacgctcttccgatctaagatcaccacctaacaaaataaaatcca

SEQ ID NO: 3252 - DNA, 96 bp, Artificial Sequence
  Description of Artificial Sequence: Synthetic primer
aatgatacggcgaccaccgagatctacactatagcctacactctttccctacacgacgctcttccgatctaccaagggaatatggtagatagtgca

SEQ ID NO: 3253 - DNA, 95 bp, Artificial Sequence
  Description of Artificial Sequence: Synthetic primer
aatgatacggcgaccaccgagatctacactatagcctacactctttccctacacgacgctcttccgatcttaacaagggattccagaagtcaggt

SEQ ID NO: 3254 - DNA, 95 bp, Artificial Sequence
  Description of Artificial Sequence: Synthetic primer
aatgatacggcgaccaccgagatctacactatagcctacactctttccctacacgacgctcttccgatctttcaaccaggaggtgaggaggtttc

SEQ ID NO: 3255 - DNA, 96 bp, Artificial Sequence
  Description of Artificial Sequence: Synthetic primer
aatgatacggcgaccaccgagatctacactatagcctacactctttccctacacgacgctcttccgatctagtccagctaatacagtgcttgaaca

SEQ ID NO: 3256 - DNA, 94 bp, Artificial Sequence
  Description of Artificial Sequence: Synthetic primer
aatgatacggcgaccaccgagatctacactatagcctacactctttccctacacgacgctcttccgatctagctggaaataaggcatccaagga

SEQ ID NO: 3257 - DNA, 100 bp, Artificial Sequence
  Description of Artificial Sequence: Synthetic polynucleotide
aatgatacggcgaccaccgagatctacactatagcctacactctttccctacacgacgctcttccgatcttcatagagtttggatttttcctttttgctt

SEQ ID NO: 3258 - DNA, 99 bp, Artificial Sequence
  Description of Artificial Sequence: Synthetic primer
aatgatacggcgaccaccgagatctacactatagcctacactctttccctacacgacgctcttccgatctcatacagaggaaactaggactgtgtgaat

SEQ ID NO: 3259 - DNA, 103 bp, Artificial Sequence
  Description of Artificial Sequence: Synthetic polynucleotide
aatgatacggcgaccaccgagatctacactatagcctacactctttccctacacgacgctcttccgatctcttgcacattgtataaacatttaatgtaggtga

SEQ ID NO: 3260 - DNA, 97 bp, Artificial Sequence
  Description of Artificial Sequence: Synthetic primer
aatgatacggcgaccaccgagatctacactatagcctacactctttccctacacgacgctcttccgatctgagcagatgaatagtgctgtattgcca

SEQ ID NO: 3261 - DNA, 100 bp, Artificial Sequence
  Description of Artificial Sequence: Synthetic polynucleotide
aatgatacggcgaccaccgagatctacactatagcctacactctttccctacacgacgctcttccgatctgatccagtggtatagaaatcttcgattttt

SEQ ID NO: 3262 - DNA, 100 bp, Artificial Sequence
  Description of Artificial Sequence: Synthetic polynucleotide
aatgatacggcgaccaccgagatctacactatagcctacactctttccctacacgacgctcttccgatctttttcactaatgagcttgccattctttcta

SEQ ID NO: 3263 - DNA, 100 bp, Artificial Sequence
  Description of Artificial Sequence: Synthetic polynucleotide
aatgatacggcgaccaccgagatctacactatagcctacactctttccctacacgacgctcttccgatctgttgagacttacgtgcttagttgataaatt

SEQ ID NO: 3264 - DNA, 98 bp, Artificial Sequence
  Description of Artificial Sequence: Synthetic primer
aatgatacggcgaccaccgagatctacactatagcctacactctttccctacacgacgctcttccgatctcaactacctaatgttatacaggctctgg

SEQ ID NO: 3265 - DNA, 100 bp, Artificial Sequence
  Description of Artificial Sequence: Synthetic polynucleotide
aatgatacggcgaccaccgagatctacactatagcctacactctttccctacacgacgctcttccgatcttcaaatgatgcttgtttatctcagtcaaaa

SEQ ID NO: 3266 - DNA, 105 bp, Artificial Sequence
  Description of Artificial Sequence: Synthetic polynucleotide
aatgatacggcgaccaccgagatctacactatagcctacactctttccctacacgacgctcttccgatcttctgtctttacccattatttataggattttgtcac

SEQ ID NO: 3267 - DNA, 103 bp, Artificial Sequence
  Description of Artificial Sequence: Synthetic polynucleotide
aatgatacggcgaccaccgagatctacactatagcctacactctttccctacacgacgctcttccgatctctggttagataataattgtgagtatgttgtcat

SEQ ID NO: 3268 - DNA, 102 bp, Artificial Sequence
  Description of Artificial Sequence: Synthetic polynucleotide
aatgatacggcgaccaccgagatctacactatagcctacactctttccctacacgacgctcttccgatctattactttcgtgtaacctgtaaggaagaaaaa

SEQ ID NO: 3269 - DNA, 97 bp, Artificial Sequence
  Description of Artificial Sequence: Synthetic primer
aatgatacggcgaccaccgagatctacactatagcctacactctttccctacacgacgctcttccgatctttcacgtagtacacattgcttctagta

SEQ ID NO: 3270 - DNA, 103 bp, Artificial Sequence
  Description of Artificial Sequence: Synthetic polynucleotide
aatgatacggcgaccaccgagatctacactatagcctacactctttccctacacgacgctcttccgatctcggcttatatctgtttattattcagtattcctg

SEQ ID NO: 3271 - DNA, 105 bp, Artificial Sequence
  Description of Artificial Sequence: Synthetic polynucleotide
aatgatacggcgaccaccgagatctacactatagcctacactctttccctacacgacgctcttccgatctggagaaaggacaaggaagaattatattaaaagcat

SEQ ID NO: 3272 - DNA, 103 bp, Artificial Sequence
  Description of Artificial Sequence: Synthetic polynucleotide
aatgatacggcgaccaccgagatctacactatagcctacactctttccctacacgacgctcttccgatctctaacaatccatttattagtagcagaaagaagt

SEQ ID NO: 3273 - DNA, 92 bp, Artificial Sequence
  Description of Artificial Sequence: Synthetic primer
aatgatacggcgaccaccgagatctacactatagcctacactctttccctacacgacgctcttccgatctaggagtctccacgttcatggct

SEQ ID NO: 3274 - DNA, 102 bp, Artificial Sequence
  Description of Artificial Sequence: Synthetic polynucleotide
aatgatacggcgaccaccgagatctacactatagcctacactctttccctacacgacgctcttccgatcttatgtgtatgttaccacattttatgtgatggg

SEQ ID NO: 3275 - DNA, 98 bp, Artificial Sequence
  Description of Artificial Sequence: Synthetic primer
aatgatacggcgaccaccgagatctacactatagcctacactctttccctacacgacgctcttccgatctggccaatcagataccaactgttaataat

SEQ ID NO: 3276 - DNA, 93 bp, Artificial Sequence
  Description of Artificial Sequence: Synthetic primer
aatgatacggcgaccaccgagatctacactatagcctacactctttccctacacgacgctcttccgatcttgctgtctcttctcatgctgtcc

SEQ ID NO: 3277 - DNA, 99 bp, Artificial Sequence
  Description of Artificial Sequence: Synthetic primer
aatgatacggcgaccaccgagatctacactatagcctacactctttccctacacgacgctcttccgatctttgtcactgtctaacatgacttttagaaa

SEQ ID NO: 3278 - DNA, 89 bp, Artificial Sequence
  Description of Artificial Sequence: Synthetic primer
aatgatacggcgaccaccgagatctacactatagcctacactctttccctacacgacgctcttccgatctagaacggttgggccttgcc

SEQ ID NO: 3279 - DNA, 89 bp, Artificial Sequence
  Description of Artificial Sequence: Synthetic primer
aatgatacggcgaccaccgagatctacactatagcctacactctttccctacacgacgctcttccgatctgcggagatcggtagcgcct

SEQ ID NO: 3280 - DNA, 98 bp, Artificial Sequence
  Description of Artificial Sequence: Synthetic primer
aatgatacggcgaccaccgagatctacactatagcctacactctttccctacacgacgctcttccgatctaactgcctttaaggaaacttgaccaaat

SEQ ID NO: 3281 - DNA, 88 bp, Artificial Sequence
  Description of Artificial Sequence: Synthetic primer
aatgatacggcgaccaccgagatctacactatagcctacactctttccctacacgacgctcttccgatctctctgcacccggccctta

SEQ ID NO: 3282 - DNA, 95 bp, Artificial Sequence
  Description of Artificial Sequence: Synthetic primer
aatgatacggcgaccaccgagatctacactatagcctacactctttccctacacgacgctcttccgatctttaaatactctttccttgcctggca

SEQ ID NO: 3283 - DNA, 95 bp, Artificial Sequence
  Description of Artificial Sequence: Synthetic primer
aatgatacggcgaccaccgagatctacactatagcctacactctttccctacacgacgctcttccgatctctacactctatgtgcctgaggattt

SEQ ID NO: 3284 - DNA, 99 bp, Artificial Sequence
  Description of Artificial Sequence: Synthetic primer
aatgatacggcgaccaccgagatctacactatagcctacactctttccctacacgacgctcttccgatctgccattgttcgagatttaggactctagtg

SEQ ID NO: 3285 - DNA, 93 bp, Artificial Sequence
  Description of Artificial Sequence: Synthetic primer
aatgatacggcgaccaccgagatctacactatagcctacactctttccctacacgacgctcttccgatctatactccttttggtaagcggctc

SEQ ID NO: 3286 - DNA, 96 bp, Artificial Sequence
  Description of Artificial Sequence: Synthetic primer
aatgatacggcgaccaccgagatctacactatagcctacactctttccctacacgacgctcttccgatctcagaattggctgtaggaccatagtct

SEQ ID NO: 3287 - DNA, 95 bp, Artificial Sequence
  Description of Artificial Sequence: Synthetic primer
aatgatacggcgaccaccgagatctacactatagcctacactctttccctacacgacgctcttccgatctccaaacgatgaagcctcacttttac

SEQ ID NO: 3288 - DNA, 92 bp, Artificial Sequence
  Description of Artificial Sequence: Synthetic primer
aatgatacggcgaccaccgagatctacactatagcctacactctttccctacacgacgctcttccgatcttggcaaagcctattgtgtgctt

SEQ ID NO: 3289 - DNA, 101 bp, Artificial Sequence
  Description of Artificial Sequence: Synthetic polynucleotide
aatgatacggcgaccaccgagatctacactatagcctacactctttccctacacgacgctcttccgatctttactaccagtcataaaagaccttttcctcc

SEQ ID NO: 3290 - DNA, 90 bp, Artificial Sequence
  Description of Artificial Sequence: Synthetic primer
aatgatacggcgaccaccgagatctacactatagcctacactctttccctacacgacgctcttccgatcttgcccggccaataattgcat

SEQ ID NO: 3291 - DNA, 103 bp, Artificial Sequence
  Description of Artificial Sequence: Synthetic polynucleotide
aatgatacggcgaccaccgagatctacactatagcctacactctttccctacacgacgctcttccgatcttgttttaattcctttgagttacttccttatgca

SEQ ID NO: 3292 - DNA, 103 bp, Artificial Sequence
  Description of Artificial Sequence: Synthetic polynucleotide
aatgatacggcgaccaccgagatctacactatagcctacactctttccctacacgacgctcttccgatctatcagtcactacgattatttcggtaactaacta

SEQ ID NO: 3293 - DNA, 97 bp, Artificial Sequence
  Description of Artificial Sequence: Synthetic primer
aatgatacggcgaccaccgagatctacactatagcctacactctttccctacacgacgctcttccgatcttttttgagagggcacttctcttgctag

SEQ ID NO: 3294 - DNA, 102 bp, Artificial Sequence
  Description of Artificial Sequence: Synthetic polynucleotide
aatgatacggcgaccaccgagatctacactatagcctacactctttccctacacgacgctcttccgatctagggatgatgcactatgaaaaaacaaaaaaac

SEQ ID NO: 3295 - DNA, 93 bp, Artificial Sequence
  Description of Artificial Sequence: Synthetic primer
aatgatacggcgaccaccgagatctacactatagcctacactctttccctacacgacgctcttccgatctattccttggagcgggttgatgac

SEQ ID NO: 3296 - DNA, 98 bp, Artificial Sequence
  Description of Artificial Sequence: Synthetic primer
aatgatacggcgaccaccgagatctacactatagcctacactctttccctacacgacgctcttccgatctgtgtgtactcattctttgctaatttcca

SEQ ID NO: 3297 - DNA, 93 bp, Artificial Sequence
  Description of Artificial Sequence: Synthetic primer
aatgatacggcgaccaccgagatctacactatagcctacactctttccctacacgacgctcttccgatctggttgggcgggcaaagttaatcc

SEQ ID NO: 3298 - DNA, 98 bp, Artificial Sequence
  Description of Artificial Sequence: Synthetic primer
aatgatacggcgaccaccgagatctacactatagcctacactctttccctacacgacgctcttccgatcttaggatgtcagggctgaacctatactaa

SEQ ID NO: 3299 - DNA, 101 bp, Artificial Sequence
  Description of Artificial Sequence: Synthetic polynucleotide
aatgatacggcgaccaccgagatctacactatagcctacactctttccctacacgacgctcttccgatctgagtcattggtttatgtgatttccatttgca

SEQ ID NO: 3300 - DNA, 98 bp, Artificial Sequence
  Description of Artificial Sequence: Synthetic primer
aatgatacggcgaccaccgagatctacactatagcctacactctttccctacacgacgctcttccgatcttcttagggaactatcttatgtgtggcat

SEQ ID NO: 3301 - DNA, 101 bp, Artificial Sequence
  Description of Artificial Sequence: Synthetic polynucleotide
aatgatacggcgaccaccgagatctacactatagcctacactctttccctacacgacgctcttccgatctttgtaaagttttcttacaccttggactctac

SEQ ID NO: 3302 - DNA, 101 bp, Artificial Sequence
  Description of Artificial Sequence: Synthetic polynucleotide
aatgatacggcgaccaccgagatctacactatagcctacactctttccctacacgacgctcttccgatctgagatgatttcttagattgtcttgtgttttg

SEQ ID NO: 3303 - DNA, 97 bp, Artificial Sequence
  Description of Artificial Sequence: Synthetic primer
aatgatacggcgaccaccgagatctacactatagcctacactctttccctacacgacgctcttccgatctatcctagtttggagtctgatctctggg

SEQ ID NO: 3304 - DNA, 102 bp, Artificial Sequence
  Description of Artificial Sequence: Synthetic polynucleotide
aatgatacggcgaccaccgagatctacactatagcctacactctttccctacacgacgctcttccgatctcagaaagctcattatgggttatatctctgttc

SEQ ID NO: 3305 - DNA, 93 bp, Artificial Sequence
  Description of Artificial Sequence: Synthetic primer
aatgatacggcgaccaccgagatctacactatagcctacactctttccctacacgacgctcttccgatctagactgtttgggagcagaaaggt

SEQ ID NO: 3306 - DNA, 102 bp, Artificial Sequence; identical to SEQ ID NO: 3304
  Description of Artificial Sequence: Synthetic polynucleotide

SEQ ID NO: 3307 - DNA, 99 bp, Artificial Sequence
  Description of Artificial Sequence: Synthetic primer
aatgatacggcgaccaccgagatctacactatagcctacactctttccctacacgacgctcttccgatctttctctaactacttcttgtcaagagcaaa

SEQ ID NO: 3308 - DNA, 100 bp, Artificial Sequence
  Description of Artificial Sequence: Synthetic polynucleotide
aatgatacggcgaccaccgagatctacactatagcctacactctttccctacacgacgctcttccgatcttatctgtgcagaacaacagagtacaataat

SEQ ID NO: 3309 - DNA, 101 bp, Artificial Sequence
  Description of Artificial Sequence: Synthetic polynucleotide
aatgatacggcgaccaccgagatctacactatagcctacactctttccctacacgacgctcttccgatcttctacatcagcctttttgtcttatttttcac

SEQ ID NO: 3310 - DNA, 98 bp, Artificial Sequence
  Description of Artificial Sequence: Synthetic primer
aatgatacggcgaccaccgagatctacactatagcctacactctttccctacacgacgctcttccgatctcttttccttaggatgcttctatggcatg

SEQ ID NO: 3311 - DNA, 98 bp, Artificial Sequence
  Description of Artificial Sequence: Synthetic primer
aatgatacggcgaccaccgagatctacactatagcctacactctttccctacacgacgctcttccgatctttagaagctgaccttggtattcatgtat

SEQ ID NO: 3312 - DNA, 94 bp, Artificial Sequence
  Description of Artificial Sequence: Synthetic primer
aatgatacggcgaccaccgagatctacactatagcctacactctttccctacacgacgctcttccgatctttctctattgcagcttctgaacca

SEQ ID NO: 3313 - DNA, 101 bp, Artificial Sequence
  Description of Artificial Sequence: Synthetic polynucleotide
aatgatacggcgaccaccgagatctacactatagcctacactctttccctacacgacgctcttccgatctctttggagccatctaattcttagtaggatat

SEQ ID NO: 3314 - DNA, 93 bp, Artificial Sequence
  Description of Artificial Sequence: Synthetic primer
aatgatacggcgaccaccgagatctacactatagcctacactctttccctacacgacgctcttccgatctattaggaccagcaagtgacacag

SEQ ID NO: 3315 - DNA, 94 bp, Artificial Sequence
  Description of Artificial Sequence: Synthetic primer
aatgatacggcgaccaccgagatctacactatagcctacactctttccctacacgacgctcttccgatctacaacaggattctcagggaatggg

SEQ ID NO: 3316 - DNA, 89 bp, Artificial Sequence
  Description of Artificial Sequence: Synthetic primer
aatgatacggcgaccaccgagatctacactatagcctacactctttccctacacgacgctcttccgatctgacacggttgggagaggcc

SEQ ID NO: 3317 - DNA, 96 bp, Artificial Sequence
  Description of Artificial Sequence: Synthetic primer
aatgatacggcgaccaccgagatctacactatagcctacactctttccctacacgacgctcttccgatctaggaaacacaaggaagtacaacaaag

SEQ ID NO: 3318 - DNA, 98 bp, Artificial Sequence
  Description of Artificial Sequence: Synthetic primer
aatgatacggcgaccaccgagatctacactatagcctacactctttccctacacgacgctcttccgatctgattccctccattctctcttgttactca

SEQ ID NO: 3319 - DNA, 96 bp, Artificial Sequence; identical to SEQ ID NO: 3317
  Description of Artificial Sequence: Synthetic primer

SEQ ID NO: 3320 - DNA, 98 bp, Artificial Sequence; identical to SEQ ID NO: 3318
  Description of Artificial Sequence: Synthetic primer

SEQ ID NO: 3321 - DNA, 90 bp, Artificial Sequence
  Description of Artificial Sequence: Synthetic primer
aatgatacggcgaccaccgagatctacactatagcctacactctttccctacacgacgctcttccgatctttggtgctcaccacactcct

SEQ ID NO: 3322 - DNA, 90 bp, Artificial Sequence
  Description of Artificial Sequence: Synthetic primer
aatgatacggcgaccaccgagatctacactatagcctacactctttccctacacgacgctcttccgatctcgttgccatccaccacaccg

SEQ ID NO: 3323 - DNA, 90 bp, Artificial Sequence
  Description of Artificial Sequence: Synthetic primer
aatgatacggcgaccaccgagatctacactatagcctacactctttccctacacgacgctcttccgatcttgccctccacgcccagtatc

SEQ ID NO: 3324 - DNA, 91 bp, Artificial Sequence
  Description of Artificial Sequence: Synthetic primer
aatgatacggcgaccaccgagatctacactatagcctacactctttccctacacgacgctcttccgatctgctccctgaggctaagagctg

SEQ ID NO: 3325 - DNA, 90 bp, Artificial Sequence; identical to SEQ ID NO: 3322
  Description of Artificial Sequence: Synthetic primer

SEQ ID NO: 3326 - DNA, 90 bp, Artificial Sequence; identical to SEQ ID NO: 3323
  Description of Artificial Sequence: Synthetic primer

SEQ ID NO: 3327 - DNA, 91 bp, Artificial Sequence; identical to SEQ ID NO: 3324
  Description of Artificial Sequence: Synthetic primer

SEQ ID NO: 3328 - DNA, 91 bp, Artificial Sequence
  Description of Artificial Sequence: Synthetic primer
aatgatacggcgaccaccgagatctacactatagcctacactctttccctacacgacgctcttccgatctaaagagttagcctgggctggg

SEQ ID NO: 3329 - DNA, 89 bp, Artificial Sequence
  Description of Artificial Sequence: Synthetic primer
aatgatacggcgaccaccgagatctacactatagcctacactctttccctacacgacgctcttccgatctatagccacaggcaggcaga

SEQ ID NO: 3330 - DNA, 93 bp, Artificial Sequence
  Description of Artificial Sequence: Synthetic primer
aatgatacggcgaccaccgagatctacactatagcctacactctttccctacacgacgctcttccgatctgtcatagggcagagtcactcctt

SEQ ID NO: 3331 - DNA, 90 bp, Artificial Sequence
  Description of Artificial Sequence: Synthetic primer
aatgatacggcgaccaccgagatctacactatagcctacactctttccctacacgacgctcttccgatctgctgtgagatcacctggcca

SEQ ID NO: 3332 - DNA, 89 bp, Artificial Sequence; identical to SEQ ID NO: 3329
  Description of Artificial Sequence: Synthetic primer

SEQ ID NO: 3333 - DNA, 88 bp, Artificial Sequence
  Description of Artificial Sequence: Synthetic primer
aatgatacggcgaccaccgagatctacactatagcctacactctttccctacacgacgctcttccgatctgctgggcacgcacaaagt

SEQ ID NO: 3334 - DNA, 89 bp, Artificial Sequence; identical to SEQ ID NO: 3329
  Description of Artificial Sequence: Synthetic primer

SEQ ID NO: 3335 - DNA, 88 bp, Artificial Sequence; identical to SEQ ID NO: 3333
  Description of Artificial Sequence: Synthetic primer

SEQ ID NO: 3336 - DNA, 89 bp, Artificial Sequence; identical to SEQ ID NO: 3329
  Description of Artificial Sequence: Synthetic primer

SEQ ID NO: 3337 - DNA, 92 bp, Artificial Sequence
  Description of Artificial Sequence: Synthetic primer
aatgatacggcgaccaccgagatctacactatagcctacactctttccctacacgacgctcttccgatctctgcctacccgtcttctccatg

SEQ ID NO: 3338 - DNA, 92 bp, Artificial Sequence
  Description of Artificial Sequence: Synthetic primer
aatgatacggcgaccaccgagatctacactatagcctacactctttccctacacgacgctcttccgatcttgacccatgacccttcccttcc

SEQ ID NO: 3339 - DNA, 94 bp, Artificial Sequence
  Description of Artificial Sequence: Synthetic primer
aatgatacggcgaccaccgagatctacactatagcctacactctttccctacacgacgctcttccgatcttggtaggtcccgtttctcttggtc

SEQ ID NO: 3340 - DNA, 91 bp, Artificial Sequence
  Description of Artificial Sequence: Synthetic primer
aatgatacggcgaccaccgagatctacactatagcctacactctttccctacacgacgctcttccgatctcacaatcccttcccagcctga

SEQ ID NO: 3341 - DNA, 88 bp, Artificial Sequence
  Description of Artificial Sequence: Synthetic primer
aatgatacggcgaccaccgagatctacactatagcctacactctttccctacacgacgctcttccgatctggaccgcaagtccagcgt

SEQ ID NO: 3342 - DNA, 90 bp, Artificial Sequence
  Description of Artificial Sequence: Synthetic primer
aatgatacggcgaccaccgagatctacactatagcctacactctttccctacacgacgctcttccgatctggcttgggaaaggaagccgg

SEQ ID NO: 3343 - DNA, 88 bp, Artificial Sequence
  Description of Artificial Sequence: Synthetic primer
aatgatacggcgaccaccgagatctacactatagcctacactctttccctacacgacgctcttccgatctagctcacgccaaggtgcg

SEQ ID NO: 3344 - DNA, 91 bp, Artificial Sequence
  Description of Artificial Sequence: Synthetic primer
aatgatacggcgaccaccgagatctacactatagcctacactctttccctacacgacgctcttccgatctgcaggtgggagagacgaggtg

SEQ ID NO: 3345 - DNA, 91 bp, Artificial Sequence
  Description of Artificial Sequence: Synthetic primer
aatgatacggcgaccaccgagatctacactatagcctacactctttccctacacgacgctcttccgatctcagcagcctcacgatgtcgtg

SEQ ID NO: 3346 - DNA, 92 bp, Artificial Sequence
  Description of Artificial Sequence: Synthetic primer
aatgatacggcgaccaccgagatctacactatagcctacactctttccctacacgacgctcttccgatctgtggattcagccctcacgtctc

SEQ ID NO: 3347 - DNA, 91 bp, Artificial Sequence
  Description of Artificial Sequence: Synthetic primer
aatgatacggcgaccaccgagatctacactatagcctacactctttccctacacgacgctcttccgatctccaggtcatctacggcgttga

SEQ ID NO: 3348 - DNA, 88 bp, Artificial Sequence
  Description of Artificial Sequence: Synthetic primer
aatgatacggcgaccaccgagatctacactatagcctacactctttccctacacgacgctcttccgatctaggtgggcacacaggcag

SEQ ID NO: 3349 - DNA, 90 bp, Artificial Sequence
  Description of Artificial Sequence: Synthetic primer
aatgatacggcgaccaccgagatctacactatagcctacactctttccctacacgacgctcttccgatctctgtctggttgtgcaggctg

SEQ ID NO: 3350 - DNA, 91 bp, Artificial Sequence
  Description of Artificial Sequence: Synthetic primer
aatgatacggcgaccaccgagatctacactatagcctacactctttccctacacgacgctcttccgatctctagggaagccctggctgctg

SEQ ID NO: 3351 - DNA, 88 bp, Artificial Sequence
  Description of Artificial Sequence: Synthetic primer
aatgatacggcgaccaccgagatctacactatagcctacactctttccctacacgacgctcttccgatctcgcgactcacccggaact

SEQ ID NO: 3352 - DNA, 91 bp, Artificial Sequence; identical to SEQ ID NO: 3350
  Description of Artificial Sequence: Synthetic primer

SEQ ID NO: 3353 - DNA, 92 bp, Artificial Sequence
  Description of Artificial Sequence: Synthetic primer
aatgatacggcgaccaccgagatctacactatagcctacactctttccctacacgacgctcttccgatctctcacttgaggcccacggagtc

SEQ ID NO: 3354 - DNA, 88 bp, Artificial Sequence
  Description of Artificial Sequence: Synthetic primer
aatgatacggcgaccaccgagatctacactatagcctacactctttccctacacgacgctcttccgatctagagcctgtcagggcagc

SEQ ID NO: 3355 - DNA, 92 bp, Artificial Sequence
  Description of Artificial Sequence: Synthetic primer
aatgatacggcgaccaccgagatctacactatagcctacactctttccctacacgacgctcttccgatctcactttgaagccctcagggaac

SEQ ID NO: 3356 - DNA, 90 bp, Artificial Sequence
  Description of Artificial Sequence: Synthetic primer
aatgatacggcgaccaccgagatctacactatagcctacactctttccctacacgacgctcttccgatcttgcaggcagagcctgttccc

SEQ ID NO: 3357 - DNA, 95 bp, Artificial Sequence
  Description of Artificial Sequence: Synthetic primer
aatgatacggcgaccaccgagatctacactatagcctacactctttccctacacgacgctcttccgatcttccgtctcttttaccataaagtggg

SEQ ID NO: 3358 - DNA, 90 bp, Artificial Sequence
  Description of Artificial Sequence: Synthetic primer
aatgatacggcgaccaccgagatctacactatagcctacactctttccctacacgacgctcttccgatctcccgtcgctgaagtggtcct

SEQ ID NO: 3359 - DNA, 90 bp, Artificial Sequence
  Description of Artificial Sequence: Synthetic primer
aatgatacggcgaccaccgagatctacactatagcctacactctttccctacacgacgctcttccgatctatgtggcacaagagcccgtt

SEQ ID NO: 3360 - DNA, 91 bp, Artificial Sequence
  Description of Artificial Sequence: Synthetic primer
aatgatacggcgaccaccgagatctacactatagcctacactctttccctacacgacgctcttccgatcttggacctctccaggtgtctcc

SEQ ID NO: 3361 - DNA, 93 bp, Artificial Sequence
  Description of Artificial Sequence: Synthetic primer
aatgatacggcgaccaccgagatctacactatagcctacactctttccctacacgacgctcttccgatctgattggacaggcactcgttgaca

SEQ ID NO: 3362 - DNA, 89 bp, Artificial Sequence
  Description of Artificial Sequence: Synthetic primer
aatgatacggcgaccaccgagatctacactatagcctacactctttccctacacgacgctcttccgatctcaacaccagccctccgtgc

SEQ ID NO: 3363 - DNA, 91 bp, Artificial Sequence
  Description of Artificial Sequence: Synthetic primer
aatgatacggcgaccaccgagatctacactatagcctacactctttccctacacgacgctcttccgatctccggccacaacccttacccta

SEQ ID NO: 3364 - DNA, 89 bp, Artificial Sequence
  Description of Artificial Sequence: Synthetic primer
aatgatacggcgaccaccgagatctacactatagcctacactctttccctacacgacgctcttccgatctcacaggacacgctgggcac

SEQ ID NO: 3365 - DNA, 89 bp, Artificial Sequence
  Description of Artificial Sequence: Synthetic primer
aatgatacggcgaccaccgagatctacactatagcctacactctttccctacacgacgctcttccgatcttccttcgggcacctctgtg

SEQ ID NO: 3366 - DNA, 90 bp, Artificial Sequence
  Description of Artificial Sequence: Synthetic primer
aatgatacggcgaccaccgagatctacactatagcctacactctttccctacacgacgctcttccgatctcttccacggcctcactcgag

SEQ ID NO: 3367 - DNA, 90 bp, Artificial Sequence
  Description of Artificial Sequence: Synthetic primer
aatgatacggcgaccaccgagatctacactatagcctacactctttccctacacgacgctcttccgatctcttcctggaggaggccagag

SEQ ID NO: 3368 - DNA, 90 bp, Artificial Sequence
  Description of Artificial Sequence: Synthetic primer
aatgatacggcgaccaccgagatctacactatagcctacactctttccctacacgacgctcttccgatctctcccatcccagccctcacc

SEQ ID NO: 3369 - DNA, 90 bp, Artificial Sequence
  Description of Artificial Sequence: Synthetic primer
aatgatacggcgaccaccgagatctacactatagcctacactctttccctacacgacgctcttccgatctctccgccctctccagcacag

SEQ ID NO: 3370 - DNA, 89 bp, Artificial Sequence
  Description of Artificial Sequence: Synthetic primer
aatgatacggcgaccaccgagatctacactatagcctacactctttccctacacgacgctcttccgatctctgcactgagaaacgcgca

SEQ ID NO: 3371 - DNA, 94 bp, Artificial Sequence
  Description of Artificial Sequence: Synthetic primer
aatgatacggcgaccaccgagatctacactatagcctacactctttccctacacgacgctcttccgatctccagggtttaggactgatgtgtcc

SEQ ID NO: 3372 - DNA, 91 bp, Artificial Sequence
  Description of Artificial Sequence: Synthetic primer
aatgatacggcgaccaccgagatctacactatagcctacactctttccctacacgacgctcttccgatctacctctgagcacagtgcagtc

SEQ ID NO: 3373 - DNA, 90 bp, Artificial Sequence
  Description of Artificial Sequence: Synthetic primer
aatgatacggcgaccaccgagatctacactatagcctacactctttccctacacgacgctcttccgatcttctcggcctctggaccaggt

SEQ ID NO: 3374 - DNA, 88 bp, Artificial Sequence
  Description of Artificial Sequence: Synthetic primer
aatgatacggcgaccaccgagatctacactatagcctacactctttccctacacgacgctcttccgatctaggccagggtgcagacga

SEQ ID NO: 3375 - DNA, 89 bp, Artificial Sequence
  Description of Artificial Sequence: Synthetic primer
aatgatacggcgaccaccgagatctacactatagcctacactctttccctacacgacgctcttccgatcttcgactcggtttcccgccc

SEQ ID NO: 3376 - DNA, 91 bp, Artificial Sequence
  Description of Artificial Sequence: Synthetic primer
aatgatacggcgaccaccgagatctacactatagcctacactctttccctacacgacgctcttccgatcttgcagatggccttgccattga

SEQ ID NO: 3377 - DNA, 89 bp, Artificial Sequence
  Description of Artificial Sequence: Synthetic primer
aatgatacggcgaccaccgagatctacactatagcctacactctttccctacacgacgctcttccgatctgaggccacacggtcatggc

SEQ ID NO: 3378 - DNA, 89 bp, Artificial Sequence
  Description of Artificial Sequence: Synthetic primer
aatgatacggcgaccaccgagatctacactatagcctacactctttccctacacgacgctcttccgatctccctgcggcgacccgtata

SEQ ID NO: 3379 - DNA, 89 bp, Artificial Sequence
  Description of Artificial Sequence: Synthetic primer
aatgatacggcgaccaccgagatctacactatagcctacactctttccctacacgacgctcttccgatctatcccgccttcccaactcc

SEQ ID NO: 3380 - DNA, 92 bp, Artificial Sequence
  Description of Artificial Sequence: Synthetic primer
aatgatacggcgaccaccgagatctacactatagcctacactctttccctacacgacgctcttccgatctggccacactcgttgacatcctg

SEQ ID NO: 3381 - DNA, 89 bp, Artificial Sequence
  Description of Artificial Sequence: Synthetic primer
aatgatacggcgaccaccgagatctacactatagcctacactctttccctacacgacgctcttccgatcttcaggctgtgggtcctccc

SEQ ID NO: 3382 - DNA, 92 bp, Artificial Sequence
  Description of Artificial Sequence: Synthetic primer
aatgatacggcgaccaccgagatctacactatagcctacactctttccctacacgacgctcttccgatctctcgacaaagcaacaggtcccg

SEQ ID NO: 3383 - DNA, 90 bp, Artificial Sequence
  Description of Artificial Sequence: Synthetic primer
aatgatacggcgaccaccgagatctacactatagcctacactctttccctacacgacgctcttccgatctgtttccaaagggcgcggaaa

SEQ ID NO: 3384 - DNA, 90 bp, Artificial Sequence
  Description of Artificial Sequence: Synthetic primer
aatgatacggcgaccaccgagatctacactatagcctacactctttccctacacgacgctcttccgatctctgccaggacccgcttctct

SEQ ID NO: 3385 - DNA, 89 bp, Artificial Sequence
  Description of Artificial Sequence: Synthetic primer
aatgatacggcgaccaccgagatctacactatagcctacactctttccctacacgacgctcttccgatctgcctcccgctttgtgtgcc

SEQ ID NO: 3386 - DNA, 90 bp, Artificial Sequence
  Description of Artificial Sequence: Synthetic primer
aatgatacggcgaccaccgagatctacactatagcctacactctttccctacacgacgctcttccgatctccacagcgtctgctccacct

SEQ ID NO: 3387 - DNA, 100 bp, Artificial Sequence
  Description of Artificial Sequence: Synthetic polynucleotide
aatgatacggcgaccaccgagatctacactatagcctacactctttccctacacgacgctcttccgatctaccttgctaaaggagtgatttctatttcct

SEQ ID NO: 3388 - DNA, 92 bp, Artificial Sequence
  Description of Artificial Sequence: Synthetic primer
aatgatacggcgaccaccgagatctacactatagcctacactctttccctacacgacgctcttccgatctggaggaacgagctaaaacggag

SEQ ID NO: 3389 - DNA, 96 bp, Artificial Sequence
  Description of Artificial Sequence: Synthetic primer
aatgatacggcgaccaccgagatctacactatagcctacactctttccctacacgacgctcttccgatctactcctccaaattgcccaatactata

SEQ ID NO: 3390 - DNA, 96 bp, Artificial Sequence
  Description of Artificial Sequence: Synthetic primer
aatgatacggcgaccaccgagatctacactatagcctacactctttccctacacgacgctcttccgatctctcttgcacaaatgctgaaagctgta

SEQ ID NO: 3391 - DNA, 100 bp, Artificial Sequence
  Description of Artificial Sequence: Synthetic polynucleotide
aatgatacggcgaccaccgagatctacactatagcctacactctttccctacacgacgctcttccgatctcatcctttcagagaaaataatgctcctagt

SEQ ID NO: 3392 - DNA, 94 bp, Artificial Sequence
  Description of Artificial Sequence: Synthetic primer
aatgatacggcgaccaccgagatctacactatagcctacactctttccctacacgacgctcttccgatctgtgagagacaggatcaggtcagcg

SEQ ID NO: 3393 - DNA, 92 bp, Artificial Sequence
  Description of Artificial Sequence: Synthetic primer
aatgatacggcgaccaccgagatctacactatagcctacactctttccctacacgacgctcttccgatctttcataccagagccaccgggtg

SEQ ID NO: 3394 - DNA, 97 bp, Artificial Sequence
  Description of Artificial Sequence: Synthetic primer
aatgatacggcgaccaccgagatctacactatagcctacactctttccctacacgacgctcttccgatctgctcacacagcatactcaagaaaggat

SEQ ID NO: 3395 - DNA, 89 bp, Artificial Sequence
  Description of Artificial Sequence: Synthetic primer
aatgatacggcgaccaccgagatctacactatagcctacactctttccctacacgacgctcttccgatctgtgctgtccagggtgcctc

SEQ ID NO: 3396 - DNA, 94 bp, Artificial Sequence
  Description of Artificial Sequence: Synthetic primer
aatgatacggcgaccaccgagatctacactatagcctacactctttccctacacgacgctcttccgatctccatcagtcccagagccaggttta

SEQ ID NO: 3397 - DNA, 91 bp, Artificial Sequence
  Description of Artificial Sequence: Synthetic primer
aatgatacggcgaccaccgagatctacactatagcctacactctttccctacacgacgctcttccgatctgcagagacaggcattgcccac

SEQ ID NO: 3398 - DNA, 92 bp, Artificial Sequence
  Description of Artificial Sequence: Synthetic primer
aatgatacggcgaccaccgagatctacactatagcctacactctttccctacacgacgctcttccgatctgcaggacacagaaggaagtggg

SEQ ID NO: 3399 - DNA, 95 bp, Artificial Sequence
  Description of Artificial Sequence: Synthetic primer
aatgatacggcgaccaccgagatctacactatagcctacactctttccctacacgacgctcttccgatctctctcaggatgagaggttaagatgc

SEQ ID NO: 3400 - DNA, 90 bp, Artificial Sequence
  Description of Artificial Sequence: Synthetic primer
aatgatacggcgaccaccgagatctacactatagcctacactctttccctacacgacgctcttccgatcttgcagtcccttctgaaccct

SEQ ID NO: 3401 - DNA, 90 bp, Artificial Sequence
  Description of Artificial Sequence: Synthetic primer
aatgatacggcgaccaccgagatctacactatagcctacactctttccctacacgacgctcttccgatctggccagaggagggttccagg

SEQ ID NO: 3402 - DNA, 98 bp, Artificial Sequence
  Description of Artificial Sequence: Synthetic primer
aatgatacggcgaccaccgagatctacactatagcctacactctttccctacacgacgctcttccgatcttccacagcaaatgctcacagataaaatg

SEQ ID NO: 3403 - DNA, 94 bp, Artificial Sequence
  Description of Artificial Sequence: Synthetic primer
aatgatacggcgaccaccgagatctacactatagcctacactctttccctacacgacgctcttccgatctagacagtgtaagggcattatgtgg

SEQ ID NO: 3404 - DNA, 91 bp, Artificial Sequence
  Description of Artificial Sequence: Synthetic primer
aatgatacggcgaccaccgagatctacactatagcctacactctttccctacacgacgctcttccgatctctaaccaatgcaggacgggcc

SEQ ID NO: 3405 - DNA, 90 bp, Artificial Sequence
  Description of Artificial Sequence: Synthetic primer
aatgatacggcgaccaccgagatctacactatagcctacactctttccctacacgacgctcttccgatctgtatgctgcgggcatttgga

SEQ ID NO: 3406 - DNA, 91 bp, Artificial Sequence; identical to SEQ ID NO: 3404
  Description of Artificial Sequence: Synthetic primer

SEQ ID NO: 3407 - DNA, 93 bp, Artificial Sequence
  Description of Artificial Sequence: Synthetic primer
aatgatacggcgaccaccgagatctacactatagcctacactctttccctacacgacgctcttccgatctctggcagtcctgtttgcttacca

SEQ ID NO: 3408 - DNA, 94 bp, Artificial Sequence
  Description of Artificial Sequence: Synthetic primer
aatgatacggcgaccaccgagatctacactatagcctacactctttccctacacgacgctcttccgatctcacaacttcaacaggctctgcctt

SEQ ID NO: 3409 - DNA, 90 bp, Artificial Sequence
  Description of Artificial Sequence: Synthetic primer
aatgatacggcgaccaccgagatctacactatagcctacactctttccctacacgacgctcttccgatctggcacagcccactttgctgg

SEQ ID NO: 3410 - DNA, 94 bp, Artificial Sequence; identical to SEQ ID NO: 3408
  Description of Artificial Sequence: Synthetic primer

SEQ ID NO: 3411 - DNA, 99 bp, Artificial Sequence
  Description of Artificial Sequence: Synthetic primer
aatgatacggcgaccaccgagatctacactatagcctacactctttccctacacgacgctcttccgatctcattgtccctgttgcacaaattcagattc

SEQ ID NO: 3412 - DNA, 93 bp, Artificial Sequence
  Description of Artificial Sequence: Synthetic primer
aatgatacggcgaccaccgagatctacactatagcctacactctttccctacacgacgctcttccgatctagtgggcaaacaattcctgcaaa

SEQ ID NO: 3413 - DNA, 92 bp, Artificial Sequence
  Description of Artificial Sequence: Synthetic primer
aatgatacggcgaccaccgagatctacactatagcctacactctttccctacacgacgctcttccgatctttctcccaacagatcccaggat

SEQ ID NO: 3414 - DNA, 93 bp, Artificial Sequence
  Description of Artificial Sequence: Synthetic primer
aatgatacggcgaccaccgagatctacactatagcctacactctttccctacacgacgctcttccgatctccacttaacacaaaggcagctca

SEQ ID NO: 3415 - DNA, 94 bp, Artificial Sequence
  Description of Artificial Sequence: Synthetic primer
aatgatacggcgaccaccgagatctacactatagcctacactctttccctacacgacgctcttccgatcttgtcgaaaggagacacagagctga

SEQ ID NO: 3416 - DNA, 88 bp, Artificial Sequence
  Description of Artificial Sequence: Synthetic primer
aatgatacggcgaccaccgagatctacactatagcctacactctttccctacacgacgctcttccgatcttgggcctcccttgaaccc

SEQ ID NO: 3417 - DNA, 93 bp, Artificial Sequence
  Description of Artificial Sequence: Synthetic primer
aatgatacggcgaccaccgagatctacactatagcctacactctttccctacacgacgctcttccgatctagcggtcaatcatgcctagctgt

SEQ ID NO: 3418 - DNA, 95 bp, Artificial Sequence
  Description of Artificial Sequence: Synthetic primer
aatgatacggcgaccaccgagatctacactatagcctacactctttccctacacgacgctcttccgatcttccataaagttcagggatctgggcc

SEQ ID NO: 3419 - DNA, 90 bp, Artificial Sequence
  Description of Artificial Sequence: Synthetic primer
aatgatacggcgaccaccgagatctacactatagcctacactctttccctacacgacgctcttccgatctgccctcctgggagcttcagg

SEQ ID NO: 3420 - DNA, 91 bp, Artificial Sequence
  Description of Artificial Sequence: Synthetic primer
aatgatacggcgaccaccgagatctacactatagcctacactctttccctacacgacgctcttccgatctccagccttcccggacacagtt

SEQ ID NO: 3421 - DNA, 102 bp, Artificial Sequence
  Description of Artificial Sequence: Synthetic polynucleotide
aatgatacggcgaccaccgagatctacactatagcctacactctttccctacacgacgctcttccgatcttttctgttgacttttgacttttctagtttccc

SEQ ID NO: 3422 - DNA, 92 bp, Artificial Sequence
  Description of Artificial Sequence: Synthetic primer
aatgatacggcgaccaccgagatctacactatagcctacactctttccctacacgacgctcttccgatcttcagagcgtgcttccttttgca

SEQ ID NO: 3423 - DNA, 99 bp, Artificial Sequence
  Description of Artificial Sequence: Synthetic primer
aatgatacggcgaccaccgagatctacactatagcctacactctttccctacacgacgctcttccgatctctattacaaccacactcagacagaagaga

SEQ ID NO: 3424 - DNA, 100 bp, Artificial Sequence
  Description of Artificial Sequence: Synthetic polynucleotide
aatgatacggcgaccaccgagatctacactatagcctacactctttccctacacgacgctcttccgatctgtttttctggatttatgtgtaaaggtgaaa

SEQ ID NO: 3425 - DNA, 93 bp, Artificial Sequence
  Description of Artificial Sequence: Synthetic primer
aatgatacggcgaccaccgagatctacactatagcctacactctttccctacacgacgctcttccgatctggctttaatgggaccttcactgt

SEQ ID NO: 3426 - DNA, 100 bp, Artificial Sequence
  Description of Artificial Sequence: Synthetic polynucleotide
aatgatacggcgaccaccgagatctacactatagcctacactctttccctacacgacgctcttccgatctggatttttaggcccttgtatttgttctttt

SEQ ID NO: 3427 - DNA, 101 bp, Artificial Sequence
  Description of Artificial Sequence: Synthetic polynucleotide
aatgatacggcgaccaccgagatctacactatagcctacactctttccctacacgacgctcttccgatctagagtccatagtttatcttagagttcactcc

SEQ ID NO: 3428 - DNA, 94 bp, Artificial Sequence
  Description of Artificial Sequence: Synthetic primer
aatgatacggcgaccaccgagatctacactatagcctacactctttccctacacgacgctcttccgatctttcagccagttggaagctgtcaac

SEQ ID NO: 3429 - DNA, 102 bp, Artificial Sequence
  Description of Artificial Sequence: Synthetic polynucleotide
aatgatacggcgaccaccgagatctacactatagcctacactctttccctacacgacgctcttccgatctgctactgcttgttgaaacaaaatccttttttt

SEQ ID NO: 3430 - DNA, 99 bp, Artificial Sequence
  Description of Artificial Sequence: Synthetic primer
aatgatacggcgaccaccgagatctacactatagcctacactctttccctacacgacgctcttccgatctattccattctgacttctttctgcctcttg

SEQ ID NO: 3431 - DNA, 94 bp, Artificial Sequence
  Description of Artificial Sequence: Synthetic primer
aatgatacggcgaccaccgagatctacactatagcctacactctttccctacacgacgctcttccgatctaattggccctatacttaggccctt

SEQ ID NO: 3432 - DNA, 92 bp, Artificial Sequence
  Description of Artificial Sequence: Synthetic primer
aatgatacggcgaccaccgagatctacactatagcctacactctttccctacacgacgctcttccgatctcctgtgcatgtctgccaggaaa

SEQ ID NO: 3433 - DNA, 98 bp, Artificial Sequence
  Description of Artificial Sequence: Synthetic primer
aatgatacggcgaccaccgagatctacactatagcctacactctttccctacacgacgctcttccgatctttacctgtcctggtcatttatagaaacc

SEQ ID NO: 3434 - DNA, 93 bp, Artificial Sequence
  Description of Artificial Sequence: Synthetic primer
aatgatacggcgaccaccgagatctacactatagcctacactctttccctacacgacgctcttccgatctgcgtctggagtttttgggtgtta

SEQ ID NO: 3435 - DNA, 96 bp, Artificial Sequence
  Description of Artificial Sequence: Synthetic primer
aatgatacggcgaccaccgagatctacactatagcctacactctttccctacacgacgctcttccgatctctgagaacaggaagttggtagctcag

SEQ ID NO: 3436 - DNA, 99 bp, Artificial Sequence
  Description of Artificial Sequence: Synthetic primer
aatgatacggcgaccaccgagatctacactatagcctacactctttccctacacgacgctcttccgatctattttcatacccatctcctaacggctttt

SEQ ID NO: 3437 - DNA, 96 bp, Artificial Sequence
  Description of Artificial Sequence: Synthetic primer
aatgatacggcgaccaccgagatctacactatagcctacactctttccctacacgacgctcttccgatctaaagtggaatgaccacttcagaaggg

SEQ ID NO: 3438 - DNA, 90 bp, Artificial Sequence
  Description of Artificial Sequence: Synthetic primer
aatgatacggcgaccaccgagatctacactatagcctacactctttccctacacgacgctcttccgatctatttcctgctgcctgccagc

SEQ ID NO: 3439 - DNA, 99 bp, Artificial Sequence
  Description of Artificial Sequence: Synthetic primer
aatgatacggcgaccaccgagatctacactatagcctacactctttccctacacgacgctcttccgatcttgatcctgagtcatttcttccttttccat

SEQ ID NO: 3440 - DNA, 94 bp, Artificial Sequence
  Description of Artificial Sequence: Synthetic primer
aatgatacggcgaccaccgagatctacactatagcctacactctttccctacacgacgctcttccgatctagacatgggtttaactgtctccct

SEQ ID NO: 3441 - DNA, 95 bp, Artificial Sequence
  Description of Artificial Sequence: Synthetic primer
aatgatacggcgaccaccgagatctacactatagcctacactctttccctacacgacgctcttccgatctgtcctggtgttttattgtttggctt

SEQ ID NO: 3442 - DNA, 92 bp, Artificial Sequence
  Description of Artificial Sequence: Synthetic primer
aatgatacggcgaccaccgagatctacactatagcctacactctttccctacacgacgctcttccgatctgaacagtgagccggagaagaga

SEQ ID NO: 3443 - DNA, 100 bp, Artificial Sequence
  Description of Artificial Sequence: Synthetic polynucleotide
aatgatacggcgaccaccgagatctacactatagcctacactctttccctacacgacgctcttccgatcttctctattcatttttgaggtttggttgtta

SEQ ID NO: 3444 - DNA, 93 bp, Artificial Sequence
  Description of Artificial Sequence: Synthetic primer
aatgatacggcgaccaccgagatctacactatagcctacactctttccctacacgacgctcttccgatctttcctctgcctgacattgaccct

SEQ ID NO: 3445 - DNA, 93 bp, Artificial Sequence
  Description of Artificial Sequence: Synthetic primer
aatgatacggcgaccaccgagatctacactatagcctacactctttccctacacgacgctcttccgatctatttgctcttctctccctcctcc

SEQ ID NO: 3446 - DNA, 100 bp, Artificial Sequence
  Description of Artificial Sequence: Synthetic polynucleotide
aatgatacggcgaccaccgagatctacactatagcctacactctttccctacacgacgctcttccgatctgctttgggacaaccatacatctaattcctt

SEQ ID NO: 3447 - DNA, 97 bp, Artificial Sequence
  Description of Artificial Sequence: Synthetic primer
aatgatacggcgaccaccgagatctacactatagcctacactctttccctacacgacgctcttccgatctactcaagaagcagaaagggaagaattt

SEQ ID NO: 3448 - DNA, 101 bp, Artificial Sequence
  Description of Artificial Sequence: Synthetic polynucleotide
aatgatacggcgaccaccgagatctacactatagcctacactctttccctacacgacgctcttccgatctcatgttcatgctgtgtatgtaatagaatgtt

SEQ ID NO: 3449 - DNA, 100 bp, Artificial Sequence
  Description of Artificial Sequence: Synthetic polynucleotide
aatgatacggcgaccaccgagatctacactatagcctacactctttccctacacgacgctcttccgatctcctcatagtagagcaatgtatgtctatcct

SEQ ID NO: 3450 - DNA, 100 bp, Artificial Sequence
  Description of Artificial Sequence: Synthetic polynucleotide
aatgatacggcgaccaccgagatctacactatagcctacactctttccctacacgacgctcttccgatctgagagatggtgattgcatctaatgttttcc

SEQ ID NO: 3451 - DNA, 100 bp, Artificial Sequence
  Description of Artificial Sequence: Synthetic polynucleotide
aatgatacggcgaccaccgagatctacactatagcctacactctttccctacacgacgctcttccgatctaaaagtgtgtggatgtgatgaatacttcct

SEQ ID NO: 3452 - DNA, 91 bp, Artificial Sequence
  Description of Artificial Sequence: Synthetic primer
aatgatacggcgaccaccgagatctacactatagcctacactctttccctacacgacgctcttccgatctccttacaggaaatggctcgcc

SEQ ID NO: 3453 - DNA, 100 bp, Artificial Sequence
  Description of Artificial Sequence: Synthetic polynucleotide
aatgatacggcgaccaccgagatctacactatagcctacactctttccctacacgacgctcttccgatcttatatttgagtctatcgagtgtgtgcatat

SEQ ID NO: 3454 - DNA, 100 bp, Artificial Sequence
  Description of Artificial Sequence: Synthetic polynucleotide
aatgatacggcgaccaccgagatctacactatagcctacactctttccctacacgacgctcttccgatcttttgtcttcgtgatttgtaggagtcattta

SEQ ID NO: 3455 - DNA, 98 bp, Artificial Sequence
  Description of Artificial Sequence: Synthetic primer
aatgatacggcgaccaccgagatctacactatagcctacactctttccctacacgacgctcttccgatctgggaagaaaagtgttttgaaatgtgttt

SEQ ID NO: 3456 - DNA, 98 bp, Artificial Sequence
  Description of Artificial Sequence: Synthetic primer
aatgatacggcgaccaccgagatctacactatagcctacactctttccctacacgacgctcttccgatcttagcttttcttccatctcttaggaaact

SEQ ID NO: 3457 - DNA, 99 bp, Artificial Sequence
  Description of Artificial Sequence: Synthetic primer
aatgatacggcgaccaccgagatctacactatagcctacactctttccctacacgacgctcttccgatcttttctgtaaatcatctgtgaatccagagg

SEQ ID NO: 3458 - DNA, 94 bp, Artificial Sequence
  Description of Artificial Sequence: Synthetic primer
aatgatacggcgaccaccgagatctacactatagcctacactctttccctacacgacgctcttccgatctatgtcaaccttttgaacagcatgc

SEQ ID NO: 3459 - DNA, 100 bp, Artificial Sequence
  Description of Artificial Sequence: Synthetic polynucleotide
aatgatacggcgaccaccgagatctacactatagcctacactctttccctacacgacgctcttccgatctttctcatacacagatgtattgcttggtaaa

SEQ ID NO: 3460 - DNA, 99 bp, Artificial Sequence
  Description of Artificial Sequence: Synthetic primer
aatgatacggcgaccaccgagatctacactatagcctacactctttccctacacgacgctcttccgatctgaaactgaccctgatttgtttttttggaa

SEQ ID NO: 3461 - DNA, 103 bp, Artificial Sequence
  Description of Artificial Sequence: Synthetic polynucleotide
aatgatacggcgaccaccgagatctacactatagcctacactctttccctacacgacgctcttccgatctatggtggttttgtttctaaattacaggttttga

SEQ ID NO: 3462 - DNA, 94 bp, Artificial Sequence
  Description of Artificial Sequence: Synthetic primer
aatgatacggcgaccaccgagatctacactatagcctacactctttccctacacgacgctcttccgatctttgtcgtgcatgtgggatgtattt

SEQ ID NO: 3463 - DNA, 101 bp, Artificial Sequence
  Description of Artificial Sequence: Synthetic polynucleotide
aatgatacggcgaccaccgagatctacactatagcctacactctttccctacacgacgctcttccgatctagtcagtttcttactgtgactatcctttttt

SEQ ID NO: 3464 - DNA, 103 bp, Artificial Sequence
  Description of Artificial Sequence: Synthetic polynucleotide
aatgatacggcgaccaccgagatctacactatagcctacactctttccctacacgacgctcttccgatctttcagggtaaaataataataaagcaaaggtacc

SEQ ID NO: 3465 - DNA, 99 bp, Artificial Sequence
  Description of Artificial Sequence: Synthetic primer
aatgatacggcgaccaccgagatctacactatagcctacactctttccctacacgacgctcttccgatctaatttgcatctgtggcattaaatggtgat

SEQ ID NO: 3466 - DNA, 105 bp, Artificial Sequence
  Description of Artificial Sequence: Synthetic polynucleotide
aatgatacggcgaccaccgagatctacactatagcctacactctttccctacacgacgctcttccgatctcatcatttaattgtaaacgtgttactcctctttca

SEQ ID NO: 3467 - DNA, 102 bp, Artificial Sequence
  Description of Artificial Sequence: Synthetic polynucleotide
aatgatacggcgaccaccgagatctacactatagcctacactctttccctacacgacgctcttccgatctcaagttggcctgaatcactatatttccatact

SEQ ID NO: 3468 - DNA, 98 bp, Artificial Sequence
  Description of Artificial Sequence: Synthetic primer
aatgatacggcgaccaccgagatctacactatagcctacactctttccctacacgacgctcttccgatctataaacgagaacgtgtgccatttgtttt

SEQ ID NO: 3469 - DNA, 100 bp, Artificial Sequence
  Description of Artificial Sequence: Synthetic polynucleotide
aatgatacggcgaccaccgagatctacactatagcctacactctttccctacacgacgctcttccgatctccaaactgaccaaactgttcttattactta

SEQ ID NO: 3470 - DNA, 94 bp, Artificial Sequence
  Description of Artificial Sequence: Synthetic primer
aatgatacggcgaccaccgagatctacactatagcctacactctttccctacacgacgctcttccgatctatgaatgatgcacatcatggtggc

SEQ ID NO: 3471 - DNA, 91 bp, Artificial Sequence
  Description of Artificial Sequence: Synthetic primer
aatgatacggcgaccaccgagatctacactatagcctacactctttccctacacgacgctcttccgatctttgcctggctctaggtccctt

SEQ ID NO: 3472 - DNA, 92 bp, Artificial Sequence
  Description of Artificial Sequence: Synthetic primer
aatgatacggcgaccaccgagatctacactatagcctacactctttccctacacgacgctcttccgatctctattgctagggccagaatgcc

SEQ ID NO: 3473 - DNA, 92 bp, Artificial Sequence
  Description of Artificial Sequence: Synthetic primer
aatgatacggcgaccaccgagatctacactatagcctacactctttccctacacgacgctcttccgatctcactaccacggtgggaagaccc

SEQ ID NO: 3474 - DNA, 90 bp, Artificial Sequence
  Description of Artificial Sequence: Synthetic primer
aatgatacggcgaccaccgagatctacactatagcctacactctttccctacacgacgctcttccgatctaatcagacccgctgtgcgtg

SEQ ID NO: 3475 - DNA, 92 bp, Artificial Sequence
  Description of Artificial Sequence: Synthetic primer
aatgatacggcgaccaccgagatctacactatagcctacactctttccctacacgacgctcttccgatctacaggaaacacagcattcagcc

SEQ ID NO: 3476 - DNA, 90 bp, Artificial Sequence
  Description of Artificial Sequence: Synthetic primer
aatgatacggcgaccaccgagatctacactatagcctacactctttccctacacgacgctcttccgatctcacccggcccaatcacaatg

SEQ ID NO: 3477 - DNA, 98 bp, Artificial Sequence
  Description of Artificial Sequence: Synthetic primer
aatgatacggcgaccaccgagatctacactatagcctacactctttccctacacgacgctcttccgatctaaagtttttgcttcaaatgtctcccata

SEQ ID NO: 3478 - DNA, 96 bp, Artificial Sequence
  Description of Artificial Sequence: Synthetic primer
aatgatacggcgaccaccgagatctacactatagcctacactctttccctacacgacgctcttccgatctgctgaaaggaatttgacttccacaaa

SEQ ID NO: 3479 - DNA, 89 bp, Artificial Sequence
  Description of Artificial Sequence: Synthetic primer
aatgatacggcgaccaccgagatctacactatagcctacactctttccctacacgacgctcttccgatctctgaggtgtcccgcaagcc

SEQ ID NO: 3480 - DNA, 92 bp, Artificial Sequence
  Description of Artificial Sequence: Synthetic primer
aatgatacggcgaccaccgagatctacactatagcctacactctttccctacacgacgctcttccgatctagttcccagacctcccgataaa

SEQ ID NO: 3481 - DNA, 88 bp, Artificial Sequence
  Description of Artificial Sequence: Synthetic primer
aatgatacggcgaccaccgagatctacactatagcctacactctttccctacacgacgctcttccgatcttggaagcgccctcagtgc

SEQ ID NO: 3482 - DNA, 91 bp, Artificial Sequence
  Description of Artificial Sequence: Synthetic primer
aatgatacggcgaccaccgagatctacactatagcctacactctttccctacacgacgctcttccgatctgctgaacacgcaaaagaccga

SEQ ID NO: 3483 - DNA, 95 bp, Artificial Sequence
  Description of Artificial Sequence: Synthetic primer
aatgatacggcgaccaccgagatctacactatagcctacactctttccctacacgacgctcttccgatctaagtcatattctctggtttcccgag

SEQ ID NO: 3484 - DNA, 100 bp, Artificial Sequence
  Description of Artificial Sequence: Synthetic polynucleotide
aatgatacggcgaccaccgagatctacactatagcctacactctttccctacacgacgctcttccgatctaggttctgttatttttttgaagacaggaag

SEQ ID NO: 3485 - DNA, 88 bp, Artificial Sequence
  Description of Artificial Sequence: Synthetic primer
aatgatacggcgaccaccgagatctacactatagcctacactctttccctacacgacgctcttccgatcttccgtgcggagctggaca

SEQ ID NO: 3486 - DNA, 93 bp, Artificial Sequence
  Description of Artificial Sequence: Synthetic primer
aatgatacggcgaccaccgagatctacactatagcctacactctttccctacacgacgctcttccgatctcattctgcacccaatcaaaaggc

SEQ ID NO: 3487 - DNA, 93 bp, Artificial Sequence
  Description of Artificial Sequence: Synthetic primer
aatgatacggcgaccaccgagatctacactatagcctacactctttccctacacgacgctcttccgatctacagccttcatcaccagaagctc

SEQ ID NO: 3488 - DNA, 97 bp, Artificial Sequence
  Description of Artificial Sequence: Synthetic primer
aatgatacggcgaccaccgagatctacactatagcctacactctttccctacacgacgctcttccgatctggacaaatacttaggaacagaggaagc

SEQ ID NO: 3489 - DNA, 89 bp, Artificial Sequence
  Description of Artificial Sequence: Synthetic primer
aatgatacggcgaccaccgagatctacactatagcctacactctttccctacacgacgctcttccgatctgccgggtggcatttgtcaa

SEQ ID NO: 3490 - DNA, 100 bp, Artificial Sequence
  Description of Artificial Sequence: Synthetic polynucleotide
aatgatacggcgaccaccgagatctacactatagcctacactctttccctacacgacgctcttccgatctgaaaagtaaagactaaaacaaccaaaccaa

SEQ ID NO: 3491 - DNA, 90 bp, Artificial Sequence
  Description of Artificial Sequence: Synthetic primer
aatgatacggcgaccaccgagatctacactatagcctacactctttccctacacgacgctcttccgatctagtctgcacgccgattcgaa

SEQ ID NO: 3492 - DNA, 92 bp, Artificial Sequence
  Description of Artificial Sequence: Synthetic primer
aatgatacggcgaccaccgagatctacactatagcctacactctttccctacacgacgctcttccgatctattgtcctcgggagctggctta

SEQ ID NO: 3493 - DNA, 97 bp, Artificial Sequence
  Description of Artificial Sequence: Synthetic primer
aatgatacggcgaccaccgagatctacactatagcctacactctttccctacacgacgctcttccgatcttggtactcactttggttgaatttttgt

SEQ ID NO: 3494 - DNA, 95 bp, Artificial Sequence
  Description of Artificial Sequence: Synthetic primer
aatgatacggcgaccaccgagatctacactatagcctacactctttccctacacgacgctcttccgatctctgagtcctagagaagtcacagaca

SEQ ID NO: 3495 - DNA, 102 bp, Artificial Sequence
  Description of Artificial Sequence: Synthetic polynucleotide
aatgatacggcgaccaccgagatctacactatagcctacactctttccctacacgacgctcttccgatcttgtttctgtgataagctctcctgatttgtaac

SEQ ID NO: 3496 - DNA, 91 bp, Artificial Sequence
  Description of Artificial Sequence: Synthetic primer
aatgatacggcgaccaccgagatctacactatagcctacactctttccctacacgacgctcttccgatctcattagtaggtggacgcggcg

SEQ ID NO: 3497 - DNA, 91 bp, Artificial Sequence
  Description of Artificial Sequence: Synthetic primer
aatgatacggcgaccaccgagatctacactatagcctacactctttccctacacgacgctcttccgatcttatcaaccgcgaggagggacc

SEQ ID NO: 3498 - DNA, 95 bp, Artificial Sequence
  Description of Artificial Sequence: Synthetic primer
aatgatacggcgaccaccgagatctacactatagcctacactctttccctacacgacgctcttccgatctggaagagaaagtgggaggagagagt

SEQ ID NO: 3499 - DNA, 91 bp, Artificial Sequence
  Description of Artificial Sequence: Synthetic primer
aatgatacggcgaccaccgagatctacactatagcctacactctttccctacacgacgctcttccgatctttaccagccgaggccatgttg

SEQ ID NO: 3500 - DNA, 90 bp, Artificial Sequence
  Description of Artificial Sequence: Synthetic primer
aatgatacggcgaccaccgagatctacactatagcctacactctttccctacacgacgctcttccgatcttcaggcgtgaaaatgggagc

SEQ ID NO: 3501 - DNA, 90 bp, Artificial Sequence
  Description of Artificial Sequence: Synthetic primer
aatgatacggcgaccaccgagatctacactatagcctacactctttccctacacgacgctcttccgatctcgctcctccgtcttctccca

SEQ ID NO: 3502 - DNA, 89 bp, Artificial Sequence
  Description of Artificial Sequence: Synthetic primer
aatgatacggcgaccaccgagatctacactatagcctacactctttccctacacgacgctcttccgatctagtggcgctccgtgtgtct

SEQ ID NO: 3503 - DNA, 93 bp, Artificial Sequence
  Description of Artificial Sequence: Synthetic primer
aatgatacggcgaccaccgagatctacactatagcctacactctttccctacacgacgctcttccgatctacatggtctctgtgcttcagctg

SEQ ID NO: 3504 - DNA, 89 bp, Artificial Sequence
  Description of Artificial Sequence: Synthetic primer
aatgatacggcgaccaccgagatctacactatagcctacactctttccctacacgacgctcttccgatcttccctgtggagctggtgga

SEQ ID NO: 3505 - DNA, 89 bp, Artificial Sequence
  Description of Artificial Sequence: Synthetic primer
aatgatacggcgaccaccgagatctacactatagcctacactctttccctacacgacgctcttccgatcttgggctgggagtagaggga

SEQ ID NO: 3506 - DNA, 91 bp, Artificial Sequence
  Description of Artificial Sequence: Synthetic primer
aatgatacggcgaccaccgagatctacactatagcctacactctttccctacacgacgctcttccgatctgagcagacccagcaatgtgga

SEQ ID NO: 3507 - DNA, 99 bp, Artificial Sequence
  Description of Artificial Sequence: Synthetic primer
aatgatacggcgaccaccgagatctacactatagcctacactctttccctacacgacgctcttccgatctacaatatgtgttgaatactgaatcagctg

SEQ ID NO: 3508 - DNA, 89 bp, Artificial Sequence
  Description of Artificial Sequence: Synthetic primer
aatgatacggcgaccaccgagatctacactatagcctacactctttccctacacgacgctcttccgatctagacggccagcaggaagca

SEQ ID NO: 3509 - DNA, 99 bp, Artificial Sequence; identical to SEQ ID NO: 3507
  Description of Artificial Sequence: Synthetic primer

SEQ ID NO: 3510 - DNA, 92 bp, Artificial Sequence
  Description of Artificial Sequence: Synthetic primer
aatgatacggcgaccaccgagatctacactatagcctacactctttccctacacgacgctcttccgatctactgttcccagaagaggaaggg

SEQ ID NO: 3511 - DNA, 92 bp, Artificial Sequence
  Description of Artificial Sequence: Synthetic primer
aatgatacggcgaccaccgagatctacactatagcctacactctttccctacacgacgctcttccgatctctcgggtggaatcagtccctct

SEQ ID NO: 3512 - DNA, 89 bp, Artificial Sequence
  Description of Artificial Sequence: Synthetic primer
aatgatacggcgaccaccgagatctacactatagcctacactctttccctacacgacgctcttccgatctgcgttgggagtgggcgtag

SEQ ID NO: 3513 - DNA, 90 bp, Artificial Sequence
  Description of Artificial Sequence: Synthetic primer
aatgatacggcgaccaccgagatctacactatagcctacactctttccctacacgacgctcttccgatctcccactcctgcaagcactca

SEQ ID NO: 3514 - DNA, 92 bp, Artificial Sequence
  Description of Artificial Sequence: Synthetic primer
aatgatacggcgaccaccgagatctacactatagcctacactctttccctacacgacgctcttccgatctgtagaagttggcctgtgaggct

SEQ ID NO: 3515 - DNA, 90 bp, Artificial Sequence
  Description of Artificial Sequence: Synthetic primer
aatgatacggcgaccaccgagatctacactatagcctacactctttccctacacgacgctcttccgatctagcaccgccttgagggaact

SEQ ID NO: 3516 - DNA, 90 bp, Artificial Sequence
  Description of Artificial Sequence: Synthetic primer
aatgatacggcgaccaccgagatctacactatagcctacactctttccctacacgacgctcttccgatctggcagagagggctgaaggcc

SEQ ID NO: 3517 - DNA, 89 bp, Artificial Sequence; identical to SEQ ID NO: 3512
  Description of Artificial Sequence: Synthetic primer

SEQ ID NO: 3518 - DNA, 91 bp, Artificial Sequence
  Description of Artificial Sequence: Synthetic primer
aatgatacggcgaccaccgagatctacactatagcctacactctttccctacacgacgctcttccgatctcttgtctcctcctcctggcct

SEQ ID NO: 3519 - DNA, 89 bp, Artificial Sequence
  Description of Artificial Sequence: Synthetic primer
aatgatacggcgaccaccgagatctacactatagcctacactctttccctacacgacgctcttccgatcttgcccgtctcctcgcctct

SEQ ID NO: 3520 - DNA, 91 bp, Artificial Sequence
  Description of Artificial Sequence: Synthetic primer
aatgatacggcgaccaccgagatctacactatagcctacactctttccctacacgacgctcttccgatctgatgctaagtctctgccctgc

SEQ ID NO: 3521 - DNA, 96 bp, Artificial Sequence
  Description of Artificial Sequence: Synthetic primer
aatgatacggcgaccaccgagatctacactatagcctacactctttccctacacgacgctcttccgatctctggaagaggtagagagtggatgaca

SEQ ID NO: 3522 - DNA, 89 bp, Artificial Sequence; identical to SEQ ID NO: 3519
  Description of Artificial Sequence: Synthetic primer

SEQ ID NO: 3523 - DNA, 92 bp, Artificial Sequence
  Description of Artificial Sequence: Synthetic primer
aatgatacggcgaccaccgagatctacactatagcctacactctttccctacacgacgctcttccgatctgggcgaaatgggcaagattcca

SEQ ID NO: 3524 - DNA, 92 bp, Artificial Sequence
  Description of Artificial Sequence: Synthetic primer
aatgatacggcgaccaccgagatctacactatagcctacactctttccctacacgacgctcttccgatctgcatcacggctacaaaggtgca

SEQ ID NO: 3525 - DNA, 90 bp, Artificial Sequence
  Description of Artificial Sequence: Synthetic primer
aatgatacggcgaccaccgagatctacactatagcctacactctttccctacacgacgctcttccgatcttgagctgcctcagatgagcc

SEQ ID NO: 3526 - DNA, 88 bp, Artificial Sequence
  Description of Artificial Sequence: Synthetic primer
aatgatacggcgaccaccgagatctacactatagcctacactctttccctacacgacgctcttccgatctaggtgatgccgagcaggg

SEQ ID NO: 3527 - DNA, 90 bp, Artificial Sequence; identical to SEQ ID NO: 3525
  Description of Artificial Sequence: Synthetic primer

SEQ ID NO: 3528 - DNA, 93 bp, Artificial Sequence
  Description of Artificial Sequence: Synthetic primer
aatgatacggcgaccaccgagatctacactatagcctacactctttccctacacgacgctcttccgatctggaggagaaggcatggatctgct

SEQ ID NO: 3529 - DNA, 91 bp, Artificial Sequence
  Description of Artificial Sequence: Synthetic primer
aatgatacggcgaccaccgagatctacactatagcctacactctttccctacacgacgctcttccgatctggtgactggcactgagtctgc

SEQ ID NO: 3530 - DNA, 92 bp, Artificial Sequence
  Description of Artificial Sequence: Synthetic primer
aatgatacggcgaccaccgagatctacactatagcctacactctttccctacacgacgctcttccgatctagaaacagggtggataggaggg

SEQ ID NO: 3531 - DNA, 91 bp, Artificial Sequence; identical to SEQ ID NO: 3529
  Description of Artificial Sequence: Synthetic primer

SEQ ID NO: 3532 - DNA, 89 bp, Artificial Sequence
  Description of Artificial Sequence: Synthetic primer
aatgatacggcgaccaccgagatctacactatagcctacactctttccctacacgacgctcttccgatctttctcaggcagggcctcct

SEQ ID NO: 3533 - DNA, 93 bp, Artificial Sequence
  Description of Artificial Sequence: Synthetic primer
aatgatacggcgaccaccgagatctacactatagcctacactctttccctacacgacgctcttccgatctcagaggagaccctacctcagcag

SEQ ID NO: 3534 - DNA, 90 bp, Artificial Sequence
  Description of Artificial Sequence: Synthetic primer
aatgatacggcgaccaccgagatctacactatagcctacactctttccctacacgacgctcttccgatctgcaggaggagggaatggcct

SEQ ID NO: 3535 - DNA, 93 bp, Artificial Sequence; identical to SEQ ID NO: 3533
  Description of Artificial Sequence: Synthetic primer

SEQ ID NO: 3536 - DNA, 91 bp, Artificial Sequence
  Description of Artificial Sequence: Synthetic primer
aatgatacggcgaccaccgagatctacactatagcctacactctttccctacacgacgctcttccgatctccctggcagacctggttggaa

SEQ ID NO: 3537 - DNA, 90 bp, Artificial Sequence
  Description of Artificial Sequence: Synthetic primer
aatgatacggcgaccaccgagatctacactatagcctacactctttccctacacgacgctcttccgatctcgggagatgaagcagggccc

SEQ ID NO: 3538 - DNA, 95 bp, Artificial Sequence
  Description of Artificial Sequence: Synthetic primer
aatgatacggcgaccaccgagatctacactatagcctacactctttccctacacgacgctcttccgatcttcagccagactcacttcccatagag

SEQ ID NO: 3539 - DNA, 92 bp, Artificial Sequence
  Description of Artificial Sequence: Synthetic primer
aatgatacggcgaccaccgagatctacactatagcctacactctttccctacacgacgctcttccgatctagtcctcccacgctacagaaaa

SEQ ID NO: 3540 - DNA, 93 bp, Artificial Sequence
  Description of Artificial Sequence: Synthetic primer
aatgatacggcgaccaccgagatctacactatagcctacactctttccctacacgacgctcttccgatctagtgcttcgggtgtgaggatgtt

SEQ ID NO: 3541 - DNA, 93 bp, Artificial Sequence
  Description of Artificial Sequence: Synthetic primer
aatgatacggcgaccaccgagatctacactatagcctacactctttccctacacgacgctcttccgatctttgggctcaccatacctgagcag

SEQ ID NO: 3542 - DNA, 92 bp, Artificial Sequence
  Description of Artificial Sequence: Synthetic primer
aatgatacggcgaccaccgagatctacactatagcctacactctttccctacacgacgctcttccgatcttccgctctcttccttcttccag

SEQ ID NO: 3543 - DNA, 90 bp, Artificial Sequence
  Description of Artificial Sequence: Synthetic primer
aatgatacggcgaccaccgagatctacactatagcctacactctttccctacacgacgctcttccgatctcttcagccacaggctcccag

SEQ ID NO: 3544 - DNA, 102 bp, Artificial Sequence
  Description of Artificial Sequence: Synthetic polynucleotide
aatgatacggcgaccaccgagatctacactatagcctacactctttccctacacgacgctcttccgatctgattgctgcatatttcagatatttctttcctt

SEQ ID NO: 3545 - DNA, 96 bp, Artificial Sequence
  Description of Artificial Sequence: Synthetic primer
aatgatacggcgaccaccgagatctacactatagcctacactctttccctacacgacgctcttccgatctatggtggctttttgtttgtttgtttt

SEQ ID NO: 3546 - DNA, 102 bp, Artificial Sequence
  Description of Artificial Sequence: Synthetic polynucleotide
aatgatacggcgaccaccgagatctacactatagcctacactctttccctacacgacgctcttccgatctcttcctaagtgcaaaagataactttatatcac

SEQ ID NO: 3547 - DNA, 100 bp, Artificial Sequence
  Description of Artificial Sequence: Synthetic polynucleotide
aatgatacggcgaccaccgagatctacactatagcctacactctttccctacacgacgctcttccgatctatgcaacatttctaaagttacctacttgtt

SEQ ID NO: 3548 - DNA, 102 bp, Artificial Sequence
  Description of Artificial Sequence: Synthetic polynucleotide
aatgatacggcgaccaccgagatctacactatagcctacactctttccctacacgacgctcttccgatctcgaactggtgtaatgatatgtgcatatttatt

SEQ ID NO: 3549 - DNA, 98 bp, Artificial Sequence
  Description of Artificial Sequence: Synthetic primer
aatgatacggcgaccaccgagatctacactatagcctacactctttccctacacgacgctcttccgatctaatttggcttctcttttttttctgtcca

SEQ ID NO: 3550 - DNA, 98 bp, Artificial Sequence
  Description of Artificial Sequence: Synthetic primer
aatgatacggcgaccaccgagatctacactatagcctacactctttccctacacgacgctcttccgatctaaggcatttcctgtgaaataatactggt

SEQ ID NO: 3551 - DNA, 100 bp, Artificial Sequence
  Description of Artificial Sequence: Synthetic polynucleotide
aatgatacggcgaccaccgagatctacactatagcctacactctttccctacacgacgctcttccgatctatgcaacagataactcagattgccttataa

SEQ ID NO: 3552 - DNA, 98 bp, Artificial Sequence
  Description of Artificial Sequence: Synthetic primer
aatgatacggcgaccaccgagatctacactatagcctacactctttccctacacgacgctcttccgatctagtatagagcgtgcagataatgacaagg

SEQ ID NO: 3553 - DNA, 103 bp, Artificial Sequence
  Description of Artificial Sequence: Synthetic polynucleotide
aatgatacggcgaccaccgagatctacactatagcctacactctttccctacacgacgctcttccgatcttagtttaagatgagtcatatttgtgggttttca

SEQ ID NO: 3554 - DNA, 99 bp, Artificial Sequence
  Description of Artificial Sequence: Synthetic primer
aatgatacggcgaccaccgagatctacactatagcctacactctttccctacacgacgctcttccgatctatctgcgataaaaccaattattccataca

SEQ ID NO: 3555 - DNA, 93 bp, Artificial Sequence
  Description of Artificial Sequence: Synthetic primer
aatgatacggcgaccaccgagatctacactatagcctacactctttccctacacgacgctcttccgatctctgagaccttcctcgactgcaag

SEQ ID NO: 3556 - DNA, 91 bp, Artificial Sequence
  Description of Artificial Sequence: Synthetic primer
aatgatacggcgaccaccgagatctacactatagcctacactctttccctacacgacgctcttccgatctccaccacacccagccgctata

SEQ ID NO: 3557 - DNA, 96 bp, Artificial Sequence
  Description of Artificial Sequence: Synthetic primer
aatgatacggcgaccaccgagatctacactatagcctacactctttccctacacgacgctcttccgatctgagtctgggaatgaacactaaacaca

SEQ ID NO: 3558 - DNA, 99 bp, Artificial Sequence
  Description of Artificial Sequence: Synthetic primer
aatgatacggcgaccaccgagatctacactatagcctacactctttccctacacgacgctcttccgatctacagagcaagactctgtctcaaaaaaata

SEQ ID NO: 3559 - DNA, 96 bp, Artificial Sequence
  Description of Artificial Sequence: Synthetic primer
aatgatacggcgaccaccgagatctacactatagcctacactctttccctacacgacgctcttccgatctaatttacatccggtatcttcctggtt

SEQ ID NO: 3560 - DNA, 93 bp, Artificial Sequence
  Description of Artificial Sequence: Synthetic primer
aatgatacggcgaccaccgagatctacactatagcctacactctttccctacacgacgctcttccgatctagtctttgggctgtgaggcttgt

SEQ ID NO: 3561 - DNA, 100 bp, Artificial Sequence
  Description of Artificial Sequence: Synthetic polynucleotide
aatgatacggcgaccaccgagatctacactatagcctacactctttccctacacgacgctcttccgatctacttggaaaaaataaggaaacacattagct

SEQ ID NO: 3562 - DNA, 103 bp, Artificial Sequence
  Description of Artificial Sequence: Synthetic polynucleotide
aatgatacggcgaccaccgagatctacactatagcctacactctttccctacacgacgctcttccgatctttcattttattctttgaggcattagtcactagt

SEQ ID NO: 3563 - DNA, 99 bp, Artificial Sequence
  Description of Artificial Sequence: Synthetic primer
aatgatacggcgaccaccgagatctacactatagcctacactctttccctacacgacgctcttccgatctagtcaaaggcataaagaacaaactaacac

SEQ ID NO: 3564 - DNA, 96 bp, Artificial Sequence
  Description of Artificial Sequence: Synthetic primer
aatgatacggcgaccaccgagatctacactatagcctacactctttccctacacgacgctcttccgatctaattgtagttctcttgccagcaatct

SEQ ID NO: 3565 - DNA, 100 bp, Artificial Sequence
  Description of Artificial Sequence: Synthetic polynucleotide
aatgatacggcgaccaccgagatctacactatagcctacactctttccctacacgacgctcttccgatctctataatcactagagcaataagaggcgttg

SEQ ID NO: 3566 - DNA, 99 bp, Artificial Sequence
  Description of Artificial Sequence: Synthetic primer
aatgatacggcgaccaccgagatctacactatagcctacactctttccctacacgacgctcttccgatctaaccaatactcttgaaaaccaggattaat

SEQ ID NO: 3567 - DNA, 99 bp, Artificial Sequence
  Description of Artificial Sequence: Synthetic primer
aatgatacggcgaccaccgagatctacactatagcctacactctttccctacacgacgctcttccgatctgctagaagttgagatgttgagatagaaaa

SEQ ID NO: 3568 - DNA, 98 bp, Artificial Sequence
  Description of Artificial Sequence: Synthetic primer
aatgatacggcgaccaccgagatctacactatagcctacactctttccctacacgacgctcttccgatctagacagtgttactcaaaattctgagaca

SEQ ID NO: 3569 - DNA, 96 bp, Artificial Sequence
  Description of Artificial Sequence: Synthetic primer
aatgatacggcgaccaccgagatctacactatagcctacactctttccctacacgacgctcttccgatcttcttgtggcttaaaactctcccaaac

SEQ ID NO: 3570 - DNA, 89 bp, Artificial Sequence
  Description of Artificial Sequence: Synthetic primer
aatgatacggcgaccaccgagatctacactatagcctacactctttccctacacgacgctcttccgatctacaccggaagactgcgagc

SEQ ID NO: 3571 - DNA, 90 bp, Artificial Sequence
  Description of Artificial Sequence: Synthetic primer
aatgatacggcgaccaccgagatctacactatagcctacactctttccctacacgacgctcttccgatctcctgagcaaggagcgggtcc

SEQ ID NO: 3572 - DNA, 102 bp, Artificial Sequence
  Description of Artificial Sequence: Synthetic polynucleotide
aatgatacggcgaccaccgagatctacactatagcctacactctttccctacacgacgctcttccgatctgctgacagtgtcttgtttttttattacttact

SEQ ID NO: 3573 - DNA, 98 bp, Artificial Sequence
  Description of Artificial Sequence: Synthetic primer
aatgatacggcgaccaccgagatctacactatagcctacactctttccctacacgacgctcttccgatctttgcctccctttccaatggactatttta

SEQ ID NO: 3574 - DNA, 103 bp, Artificial Sequence
  Description of Artificial Sequence: Synthetic polynucleotide
aatgatacggcgaccaccgagatctacactatagcctacactctttccctacacgacgctcttccgatctcatgaacccatagtagagctaaattctttttta

SEQ ID NO: 3575 - DNA, 101 bp, Artificial Sequence
  Description of Artificial Sequence: Synthetic polynucleotide
aatgatacggcgaccaccgagatctacactatagcctacactctttccctacacgacgctcttccgatctgtgcttgaaaacactaatgtaacataaaggt

SEQ ID NO: 3576 - DNA, 100 bp, Artificial Sequence
  Description of Artificial Sequence: Synthetic polynucleotide
aatgatacggcgaccaccgagatctacactatagcctacactctttccctacacgacgctcttccgatctttattttacatcaactgctgtactcgatca

SEQ ID NO: 3577 - DNA, 103 bp, Artificial Sequence
  Description of Artificial Sequence: Synthetic polynucleotide
aatgatacggcgaccaccgagatctacactatagcctacactctttccctacacgacgctcttccgatctttttctttttctgtgactctttgacacgtaata

SEQ ID NO: 3578 - DNA, 93 bp, Artificial Sequence
  Description of Artificial Sequence: Synthetic primer
aatgatacggcgaccaccgagatctacactatagcctacactctttccctacacgacgctcttccgatctccaggacttatgtgaccgtggtc

SEQ ID NO: 3579 - DNA, 97 bp, Artificial Sequence
  Description of Artificial Sequence: Synthetic primer
aatgatacggcgaccaccgagatctacactatagcctacactctttccctacacgacgctcttccgatctaagtgcaacaattcaaagcccaaaaag

SEQ ID NO: 3580 - DNA, 101 bp, Artificial Sequence
  Description of Artificial Sequence: Synthetic polynucleotide
aatgatacggcgaccaccgagatctacactatagcctacactctttccctacacgacgctcttccgatcttgtttaggcttttatttcagagttcacagaa

SEQ ID NO: 3581 - DNA, 97 bp, Artificial Sequence
  Description of Artificial Sequence: Synthetic primer
aatgatacggcgaccaccgagatctacactatagcctacactctttccctacacgacgctcttccgatctttcttttctggtttttcttggctctac

SEQ ID NO: 3582 - DNA, 96 bp, Artificial Sequence
  Description of Artificial Sequence: Synthetic primer
aatgatacggcgaccaccgagatctacactatagcctacactctttccctacacgacgctcttccgatcttgttgtccctgctttttgtccttctg

SEQ ID NO: 3583 - DNA, 94 bp, Artificial Sequence
  Description of Artificial Sequence: Synthetic primer
aatgatacggcgaccaccgagatctacactatagcctacactctttccctacacgacgctcttccgatcttaaacaacttcatcctggctctgc

SEQ ID NO: 3584 - DNA, 100 bp, Artificial Sequence
  Description of Artificial Sequence: Synthetic polynucleotide
aatgatacggcgaccaccgagatctacactatagcctacactctttccctacacgacgctcttccgatctcccttaaaataaccattgtccctcacatgt

SEQ ID NO: 3585 - DNA, 100 bp, Artificial Sequence
  Description of Artificial Sequence: Synthetic polynucleotide
aatgatacggcgaccaccgagatctacactatagcctacactctttccctacacgacgctcttccgatctagcttaaacagcgtggtctacatttttgta

SEQ ID NO: 3586 - DNA, 88 bp, Artificial Sequence
  Description of Artificial Sequence: Synthetic primer
aatgatacggcgaccaccgagatctacactatagcctacactctttccctacacgacgctcttccgatcttccacagctcgctggctc

SEQ ID NO: 3587 - DNA, 90 bp, Artificial Sequence
  Description of Artificial Sequence: Synthetic primer
aatgatacggcgaccaccgagatctacactatagcctacactctttccctacacgacgctcttccgatctcctctcgtcaggtgagcgag

SEQ ID NO: 3588 - DNA, 100 bp, Artificial Sequence
  Description of Artificial Sequence: Synthetic polynucleotide
aatgatacggcgaccaccgagatctacactatagcctacactctttccctacacgacgctcttccgatcttgttatgtgcaaactattgaaacaagtatg

SEQ ID NO: 3589 - DNA, 96 bp, Artificial Sequence
  Description of Artificial Sequence: Synthetic primer
aatgatacggcgaccaccgagatctacactatagcctacactctttccctacacgacgctcttccgatcttgggagaaagtttcatctgtggatgg

SEQ ID NO: 3590 - DNA, 99 bp, Artificial Sequence
  Description of Artificial Sequence: Synthetic primer
aatgatacggcgaccaccgagatctacactatagcctacactctttccctacacgacgctcttccgatctacagttttaacatagtatccagtgtgtga

SEQ ID NO: 3591 - DNA, 100 bp, Artificial Sequence
  Description of Artificial Sequence: Synthetic polynucleotide
aatgatacggcgaccaccgagatctacactatagcctacactctttccctacacgacgctcttccgatcttgatgtagagctgataatcttttgaattga

SEQ ID NO: 3592 - DNA, 103 bp, Artificial Sequence
  Description of Artificial Sequence: Synthetic polynucleotide
aatgatacggcgaccaccgagatctacactatagcctacactctttccctacacgacgctcttccgatctgcatgagaaaactactatgacttctaaattacg

SEQ ID NO: 3593 - DNA, 105 bp, Artificial Sequence
  Description of Artificial Sequence: Synthetic polynucleotide
aatgatacggcgaccaccgagatctacactatagcctacactctttccctacacgacgctcttccgatctcagtgatacatttttcctgttttttttctgctttc

SEQ ID NO: 3594 - DNA, 99 bp, Artificial Sequence
  Description of Artificial Sequence: Synthetic primer
aatgatacggcgaccaccgagatctacactatagcctacactctttccctacacgacgctcttccgatctccctgcgattttctctcatacaaagatct

SEQ ID NO: 3595 - DNA, 103 bp, Artificial Sequence
  Description of Artificial Sequence: Synthetic polynucleotide
aatgatacggcgaccaccgagatctacactatagcctacactctttccctacacgacgctcttccgatctgtagaatgttaccaagattatttttgacctaag

SEQ ID NO: 3596 - DNA, 100 bp, Artificial Sequence
  Description of Artificial Sequence: Synthetic polynucleotide
aatgatacggcgaccaccgagatctacactatagcctacactctttccctacacgacgctcttccgatcttgttcaagagtcaagagattagattttgtt

SEQ ID NO: 3597 - DNA, 103 bp, Artificial Sequence
  Description of Artificial Sequence: Synthetic polynucleotide
aatgatacggcgaccaccgagatctacactatagcctacactctttccctacacgacgctcttccgatctcatgtaaaggataattgtcagtgacttttttct

SEQ ID NO: 3598 - DNA, 98 bp, Artificial Sequence
  Description of Artificial Sequence: Synthetic primer
aatgatacggcgaccaccgagatctacactatagcctacactctttccctacacgacgctcttccgatctgaagcattatactgcttttttgatgcat

SEQ ID NO: 3599 - DNA, 100 bp, Artificial Sequence
  Description of Artificial Sequence: Synthetic polynucleotide
aatgatacggcgaccaccgagatctacactatagcctacactctttccctacacgacgctcttccgatctctcccttcattgcttaacacattttcctat

SEQ ID NO: 3600 - DNA, 103 bp, Artificial Sequence
  Description of Artificial Sequence: Synthetic polynucleotide
aatgatacggcgaccaccgagatctacactatagcctacactctttccctacacgacgctcttccgatctaaacatttttatgtttacctatttgccttgctc

SEQ ID NO: 3601 - DNA, 102 bp, Artificial Sequence
  Description of Artificial Sequence: Synthetic polynucleotide
aatgatacggcgaccaccgagatctacactatagcctacactctttccctacacgacgctcttccgatctctcgacattgatttctgtttttacctcctaaa

SEQ ID NO: 3602 - DNA, 103 bp, Artificial Sequence
  Description of Artificial Sequence: Synthetic polynucleotide
aatgatacggcgaccaccgagatctacactatagcctacactctttccctacacgacgctcttccgatctgcaggctcttatttttctttttgtttgtttgta

SEQ ID NO: 3603 - DNA, 102 bp, Artificial Sequence
  Description of Artificial Sequence: Synthetic polynucleotide
aatgatacggcgaccaccgagatctacactatagcctacactctttccctacacgacgctcttccgatcttgctgacacaaataaggtttcaattaaacaac

SEQ ID NO: 3604 - DNA, 101 bp, Artificial Sequence
  Description of Artificial Sequence: Synthetic polynucleotide
aatgatacggcgaccaccgagatctacactatagcctacactctttccctacacgacgctcttccgatctccaaaaaaatacctagctcaagggttaatat

SEQ ID NO: 3605 - DNA, 98 bp, Artificial Sequence
  Description of Artificial Sequence: Synthetic primer
aatgatacggcgaccaccgagatctacactatagcctacactctttccctacacgacgctcttccgatcttgtgaacatcgaatcatggaatcccttg

SEQ ID NO: 3606 - DNA, 100 bp, Artificial Sequence
  Description of Artificial Sequence: Synthetic polynucleotide
aatgatacggcgaccaccgagatctacactatagcctacactctttccctacacgacgctcttccgatctacctgggaaaattatgcttactaatgtggt

SEQ ID NO: 3607 - DNA, 98 bp, Artificial Sequence
  Description of Artificial Sequence: Synthetic primer
aatgatacggcgaccaccgagatctacactatagcctacactctttccctacacgacgctcttccgatctgccaacttgaaatgaagacttttccttt

SEQ ID NO: 3608 - DNA, 103 bp, Artificial Sequence
  Description of Artificial Sequence: Synthetic polynucleotide
aatgatacggcgaccaccgagatctacactatagcctacactctttccctacacgacgctcttccgatctaaaagaggtttctgttaaaatgctacttaacag

SEQ ID NO: 3609 - DNA, 100 bp, Artificial Sequence
  Description of Artificial Sequence: Synthetic polynucleotide
aatgatacggcgaccaccgagatctacactatagcctacactctttccctacacgacgctcttccgatctcttttttgaggctaaaagaaagaaaatggt

SEQ ID NO: 3610 - DNA, 99 bp, Artificial Sequence
  Description of Artificial Sequence: Synthetic primer
aatgatacggcgaccaccgagatctacactatagcctacactctttccctacacgacgctcttccgatctatgtgcttcttaccagtcaaaaagtatta

SEQ ID NO: 3611 - DNA, 97 bp, Artificial Sequence
  Description of Artificial Sequence: Synthetic primer
aatgatacggcgaccaccgagatctacactatagcctacactctttccctacacgacgctcttccgatctacattcctcgaagcccttacaagtttc

SEQ ID NO: 3612 - DNA, 102 bp, Artificial Sequence
  Description of Artificial Sequence: Synthetic polynucleotide
aatgatacggcgaccaccgagatctacactatagcctacactctttccctacacgacgctcttccgatctatgctcatctctgcaaaattgtatatggtttt

SEQ ID NO: 3613 - DNA, 101 bp, Artificial Sequence
  Description of Artificial Sequence: Synthetic polynucleotide
aatgatacggcgaccaccgagatctacactatagcctacactctttccctacacgacgctcttccgatcttgctaactatgaaacactggcatttaatgat

SEQ ID NO: 3614 - DNA, 100 bp, Artificial Sequence
  Description of Artificial Sequence: Synthetic polynucleotide
aatgatacggcgaccaccgagatctacactatagcctacactctttccctacacgacgctcttccgatctagtcatcgaaagcatcatagttactggaaa

SEQ ID NO: 3615 - DNA, 96 bp, Artificial Sequence
  Description of Artificial Sequence: Synthetic primer
aatgatacggcgaccaccgagatctacactatagcctacactctttccctacacgacgctcttccgatctgccaacttacccagtaccatcaatgc

SEQ ID NO: 3616 - DNA, 90 bp, Artificial Sequence
  Description of Artificial Sequence: Synthetic primer
aatgatacggcgaccaccgagatctacactatagcctacactctttccctacacgacgctcttccgatctcctagccgcagtccctccag

SEQ ID NO: 3617 - DNA, 93 bp, Artificial Sequence
  Description of Artificial Sequence: Synthetic primer
aatgatacggcgaccaccgagatctacactatagcctacactctttccctacacgacgctcttccgatctatccctcactcacttccctactt

SEQ ID NO: 3618 - DNA, 90 bp, Artificial Sequence
  Description of Artificial Sequence: Synthetic primer
aatgatacggcgaccaccgagatctacactatagcctacactctttccctacacgacgctcttccgatctagcctggaccatagctcctg

SEQ ID NO: 3619 - DNA, 89 bp, Artificial Sequence
  Description of Artificial Sequence: Synthetic primer
aatgatacggcgaccaccgagatctacactatagcctacactctttccctacacgacgctcttccgatctgcagatgtggccgatgccc

SEQ ID NO: 3620 - DNA, 90 bp, Artificial Sequence
  Description of Artificial Sequence: Synthetic primer
aatgatacggcgaccaccgagatctacactatagcctacactctttccctacacgacgctcttccgatctccaggcaccttccaccagtt

SEQ ID NO: 3621 - DNA, 88 bp, Artificial Sequence
  Description of Artificial Sequence: Synthetic primer
aatgatacggcgaccaccgagatctacactatagcctacactctttccctacacgacgctcttccgatctggtcccggctggtgatca

SEQ ID NO: 3622 - DNA, 89 bp, Artificial Sequence
  Description of Artificial Sequence: Synthetic primer
aatgatacggcgaccaccgagatctacactatagcctacactctttccctacacgacgctcttccgatctaggaggtggtgatggtgcc

SEQ ID NO: 3623 - DNA, 90 bp, Artificial Sequence
  Description of Artificial Sequence: Synthetic primer
aatgatacggcgaccaccgagatctacactatagcctacactctttccctacacgacgctcttccgatcttgaccaacgccctctgcatc

SEQ ID NO: 3624 - DNA, 89 bp, Artificial Sequence
  Description of Artificial Sequence: Synthetic primer
aatgatacggcgaccaccgagatctacactatagcctacactctttccctacacgacgctcttccgatctagccagagcagcttggtgg

SEQ ID NO: 3625 - DNA, 91 bp, Artificial Sequence
  Description of Artificial Sequence: Synthetic primer
aatgatacggcgaccaccgagatctacactatagcctacactctttccctacacgacgctcttccgatctgctgcctggctaaggtgttcc

SEQ ID NO: 3626 - DNA, 89 bp, Artificial Sequence
  Description of Artificial Sequence: Synthetic primer
aatgatacggcgaccaccgagatctacactatagcctacactctttccctacacgacgctcttccgatctctgcttgtctgccacctgc

SEQ ID NO: 3627 - DNA, 91 bp, Artificial Sequence
  Description of Artificial Sequence: Synthetic primer
aatgatacggcgaccaccgagatctacactatagcctacactctttccctacacgacgctcttccgatctctcccacatgggtgacagcct

SEQ ID NO: 3628 - DNA, 91 bp, Artificial Sequence
  Description of Artificial Sequence: Synthetic primer
aatgatacggcgaccaccgagatctacactatagcctacactctttccctacacgacgctcttccgatctgagtgggctacgtctgccctc

SEQ ID NO: 3629 - DNA, 90 bp, Artificial Sequence
  Description of Artificial Sequence: Synthetic primer
aatgatacggcgaccaccgagatctacactatagcctacactctttccctacacgacgctcttccgatctgtgccaagcctcacaccacc

SEQ ID NO: 3630 - DNA, 90 bp, Artificial Sequence
  Description of Artificial Sequence: Synthetic primer
aatgatacggcgaccaccgagatctacactatagcctacactctttccctacacgacgctcttccgatctgccttcccggtcagctactc

SEQ ID NO: 3631 - DNA, 93 bp, Artificial Sequence
  Description of Artificial Sequence: Synthetic primer
aatgatacggcgaccaccgagatctacactatagcctacactctttccctacacgacgctcttccgatctccctgtcatcctcacacttttcc

SEQ ID NO: 3632 - DNA, 94 bp, Artificial Sequence
  Description of Artificial Sequence: Synthetic primer
aatgatacggcgaccaccgagatctacactatagcctacactctttccctacacgacgctcttccgatcttgacctggtatggtcatggaaggg

SEQ ID NO: 3633 - DNA, 88 bp, Artificial Sequence
  Description of Artificial Sequence: Synthetic primer
aatgatacggcgaccaccgagatctacactatagcctacactctttccctacacgacgctcttccgatctaagctgcctgacccgcac

SEQ ID NO: 3634 - DNA, 89 bp, Artificial Sequence
  Description of Artificial Sequence: Synthetic primer
aatgatacggcgaccaccgagatctacactatagcctacactctttccctacacgacgctcttccgatctatggcctgacgactcgtgc

SEQ ID NO: 3635 - DNA, 103 bp, Artificial Sequence
  Description of Artificial Sequence: Synthetic polynucleotide
aatgatacggcgaccaccgagatctacactatagcctacactctttccctacacgacgctcttccgatctcttcctagagagttagagtaacttcaatgtctt

SEQ ID NO: 3636 - DNA, 91 bp, Artificial Sequence
  Description of Artificial Sequence: Synthetic primer
aatgatacggcgaccaccgagatctacactatagcctacactctttccctacacgacgctcttccgatctgccactcactggtcctttcac

SEQ ID NO: 3637 - DNA, 90 bp, Artificial Sequence
  Description of Artificial Sequence: Synthetic primer
aatgatacggcgaccaccgagatctacactatagcctacactctttccctacacgacgctcttccgatcttgagacctggccctgcttgg

SEQ ID NO: 3638 - DNA, 92 bp, Artificial Sequence
  Description of Artificial Sequence: Synthetic primer
aatgatacggcgaccaccgagatctacactatagcctacactctttccctacacgacgctcttccgatctagtgaccggccatctctgtctt

SEQ ID NO: 3639 - DNA, 97 bp, Artificial Sequence
  Description of Artificial Sequence: Synthetic primer
aatgatacggcgaccaccgagatctacactatagcctacactctttccctacacgacgctcttccgatctcttactgtctgcacttgaagttttggt

SEQ ID NO: 3640 - DNA, 88 bp, Artificial Sequence
  Description of Artificial Sequence: Synthetic primer
aatgatacggcgaccaccgagatctacactatagcctacactctttccctacacgacgctcttccgatctagcgagatcctggccgtc

SEQ ID NO: 3641 - DNA, 89 bp, Artificial Sequence
  Description of Artificial Sequence: Synthetic primer
aatgatacggcgaccaccgagatctacactatagcctacactctttccctacacgacgctcttccgatctggcggcaggtaggtgtggt

SEQ ID NO: 3642 - DNA, 92 bp, Artificial Sequence
  Description of Artificial Sequence: Synthetic primer
aatgatacggcgaccaccgagatctacactatagcctacactctttccctacacgacgctcttccgatctgcacctctagtctcctggacct

SEQ ID NO: 3643 - DNA, 94 bp, Artificial Sequence
  Description of Artificial Sequence: Synthetic primer
aatgatacggcgaccaccgagatctacactatagcctacactctttccctacacgacgctcttccgatctgggagagggatggacagaagaact

SEQ ID NO: 3644 - DNA, 89 bp, Artificial Sequence
  Description of Artificial Sequence: Synthetic primer
aatgatacggcgaccaccgagatctacactatagcctacactctttccctacacgacgctcttccgatctgttgtgggtggtggcccag

SEQ ID NO: 3645 - DNA, 89 bp, Artificial Sequence
  Description of Artificial Sequence: Synthetic primer
aatgatacggcgaccaccgagatctacactatagcctacactctttccctacacgacgctcttccgatctggtgtaccagcctggaggg

SEQ ID NO: 3646 - DNA, 98 bp, Artificial Sequence
  Description of Artificial Sequence: Synthetic primer
aatgatacggcgaccaccgagatctacactatagcctacactctttccctacacgacgctcttccgatctcgtgtttcaagcatagttttgacagata

SEQ ID NO: 3647 - DNA, 89 bp, Artificial Sequence
  Description of Artificial Sequence: Synthetic primer
aatgatacggcgaccaccgagatctacactatagcctacactctttccctacacgacgctcttccgatctcctgtcctcccaccaccct

SEQ ID NO: 3648 - DNA, 90 bp, Artificial Sequence
  Description of Artificial Sequence: Synthetic primer
aatgatacggcgaccaccgagatctacactatagcctacactctttccctacacgacgctcttccgatctaacgcctcgctcatcttgcc

SEQ ID NO: 3649 - DNA, 103 bp, Artificial Sequence
  Description of Artificial Sequence: Synthetic polynucleotide
aatgatacggcgaccaccgagatctacactatagcctacactctttccctacacgacgctcttccgatctaaaatcatatacacatctatgaaggtgtgtact

SEQ ID NO: 3650 - DNA, 97 bp, Artificial Sequence
  Description of Artificial Sequence: Synthetic primer
aatgatacggcgaccaccgagatctacactatagcctacactctttccctacacgacgctcttccgatctagatattacaagaccagcatgtactca

SEQ ID NO: 3651 - DNA, 99 bp, Artificial Sequence
  Description of Artificial Sequence: Synthetic primer
aatgatacggcgaccaccgagatctacactatagcctacactctttccctacacgacgctcttccgatctcaaaattgcttcagaaattggagacatat

SEQ ID NO: 3652 - DNA, 102 bp, Artificial Sequence
  Description of Artificial Sequence: Synthetic polynucleotide
aatgatacggcgaccaccgagatctacactatagcctacactctttccctacacgacgctcttccgatcttttaataacagctataactacaaatggagctc

SEQ ID NO: 3653 - DNA, 100 bp, Artificial Sequence
  Description of Artificial Sequence: Synthetic polynucleotide
aatgatacggcgaccaccgagatctacactatagcctacactctttccctacacgacgctcttccgatctatgtgacacatgaataaatggtcgtttatt

SEQ ID NO: 3654 - DNA, 103 bp, Artificial Sequence
  Description of Artificial Sequence: Synthetic polynucleotide
aatgatacggcgaccaccgagatctacactatagcctacactctttccctacacgacgctcttccgatctgtttatgctacttctgaattgaaatggttcatg

SEQ ID NO: 3655 - DNA, 103 bp, Artificial Sequence
  Description of Artificial Sequence: Synthetic polynucleotide
aatgatacggcgaccaccgagatctacactatagcctacactctttccctacacgacgctcttccgatctgctaataagatttttttttctgggaatagaagc

SEQ ID NO: 3656 - DNA, 103 bp, Artificial Sequence
  Description of Artificial Sequence: Synthetic polynucleotide
aatgatacggcgaccaccgagatctacactatagcctacactctttccctacacgacgctcttccgatcttatgaatgtaccatgttaatgtcttcttgttcc

SEQ ID NO: 3657 - DNA, 91 bp, Artificial Sequence
  Description of Artificial Sequence: Synthetic primer
aatgatacggcgaccaccgagatctacactatagcctacactctttccctacacgacgctcttccgatctactggaagtaggactgcacca

SEQ ID NO: 3658 - DNA, 100 bp, Artificial Sequence
  Description of Artificial Sequence: Synthetic polynucleotide
aatgatacggcgaccaccgagatctacactatagcctacactctttccctacacgacgctcttccgatctaacttttaagttcttagacattgcataagc

SEQ ID NO: 3659 - DNA, 98 bp, Artificial Sequence
  Description of Artificial Sequence: Synthetic primer
aatgatacggcgaccaccgagatctacactatagcctacactctttccctacacgacgctcttccgatctggaggatgttctttcccatttatttcct

SEQ ID NO: 3660 - DNA, 101 bp, Artificial Sequence
  Description of Artificial Sequence: Synthetic polynucleotide
aatgatacggcgaccaccgagatctacactatagcctacactctttccctacacgacgctcttccgatctgtgcatcattattagatatgaacaggaaaag

SEQ ID NO: 3661 - DNA, 90 bp, Artificial Sequence
  Description of Artificial Sequence: Synthetic primer
aatgatacggcgaccaccgagatctacactatagcctacactctttccctacacgacgctcttccgatcttgccttagtgaccacgcggt

SEQ ID NO: 3662 - DNA, 103 bp, Artificial Sequence
  Description of Artificial Sequence: Synthetic polynucleotide
aatgatacggcgaccaccgagatctacactatagcctacactctttccctacacgacgctcttccgatctcaggcattggtttttaatgtatggaatttttct

SEQ ID NO: 3663 - DNA, 92 bp, Artificial Sequence
  Description of Artificial Sequence: Synthetic primer
aatgatacggcgaccaccgagatctacactatagcctacactctttccctacacgacgctcttccgatctggaagagatcaccctgtccctc

SEQ ID NO: 3664 - DNA, 90 bp, Artificial Sequence
  Description of Artificial Sequence: Synthetic primer
aatgatacggcgaccaccgagatctacactatagcctacactctttccctacacgacgctcttccgatctcctcctgatccctcgcagcc

SEQ ID NO: 3665 - DNA, 89 bp, Artificial Sequence
  Description of Artificial Sequence: Synthetic primer
aatgatacggcgaccaccgagatctacactatagcctacactctttccctacacgacgctcttccgatcttccctgtggtgctgcgacc

SEQ ID NO: 3666 - DNA, 93 bp, Artificial Sequence
  Description of Artificial Sequence: Synthetic primer
aatgatacggcgaccaccgagatctacactatagcctacactctttccctacacgacgctcttccgatctgcagagtgacccagtgatgtttg

SEQ ID NO: 3667 - DNA, 95 bp, Artificial Sequence
  Description of Artificial Sequence: Synthetic primer
aatgatacggcgaccaccgagatctacactatagcctacactctttccctacacgacgctcttccgatcttgggaggacttttcttgtatctcct

SEQ ID NO: 3668 - DNA, 91 bp, Artificial Sequence
  Description of Artificial Sequence: Synthetic primer
aatgatacggcgaccaccgagatctacactatagcctacactctttccctacacgacgctcttccgatctctcgctgactgttgcttccat

SEQ ID NO: 3669 - DNA, 93 bp, Artificial Sequence
  Description of Artificial Sequence: Synthetic primer
aatgatacggcgaccaccgagatctacactatagcctacactctttccctacacgacgctcttccgatctcaagcatggtgcaatctcttggc

SEQ ID NO: 3670 - DNA, 94 bp, Artificial Sequence
  Description of Artificial Sequence: Synthetic primer
aatgatacggcgaccaccgagatctacactatagcctacactctttccctacacgacgctcttccgatcttaacttgtgtcctttggttgttgc

SEQ ID NO: 3671 - DNA, 96 bp, Artificial Sequence
  Description of Artificial Sequence: Synthetic primer
aatgatacggcgaccaccgagatctacactatagcctacactctttccctacacgacgctcttccgatctggaaaagtcattcctctcactgcctc

SEQ ID NO: 3672 - DNA, 89 bp, Artificial Sequence
  Description of Artificial Sequence: Synthetic primer
aatgatacggcgaccaccgagatctacactatagcctacactctttccctacacgacgctcttccgatctcccgactcattgccctccc

SEQ ID NO: 3673 - DNA, 90 bp, Artificial Sequence
  Description of Artificial Sequence: Synthetic primer
aatgatacggcgaccaccgagatctacactatagcctacactctttccctacacgacgctcttccgatctgggcttttgctgagttggcg

SEQ ID NO: 3674 - DNA, 91 bp, Artificial Sequence
  Description of Artificial Sequence: Synthetic primer
aatgatacggcgaccaccgagatctacactatagcctacactctttccctacacgacgctcttccgatctgggcacccttggaaagaacag

SEQ ID NO: 3675 - DNA, 92 bp, Artificial Sequence
  Description of Artificial Sequence: Synthetic primer
aatgatacggcgaccaccgagatctacactatagcctacactctttccctacacgacgctcttccgatctttcactgcaatgctgttgccac

SEQ ID NO: 3676 - DNA, 91 bp, Artificial Sequence
  Description of Artificial Sequence: Synthetic primer
aatgatacggcgaccaccgagatctacactatagcctacactctttccctacacgacgctcttccgatctgacaccgtcttttcccatccc

SEQ ID NO: 3677 - DNA, 95 bp, Artificial Sequence
  Description of Artificial Sequence: Synthetic primer
aatgatacggcgaccaccgagatctacactatagcctacactctttccctacacgacgctcttccgatctgaatggcccacttctctcttctagg

SEQ ID NO: 3678 - DNA, 93 bp, Artificial Sequence
  Description of Artificial Sequence: Synthetic primer
aatgatacggcgaccaccgagatctacactatagcctacactctttccctacacgacgctcttccgatctaagtgacacctcacctctctgca

SEQ ID NO: 3679 - DNA, 90 bp, Artificial Sequence
  Description of Artificial Sequence: Synthetic primer
aatgatacggcgaccaccgagatctacactatagcctacactctttccctacacgacgctcttccgatctaacccaccttctgtcccacc

SEQ ID NO: 3680 - DNA, 92 bp, Artificial Sequence
  Description of Artificial Sequence: Synthetic primer
aatgatacggcgaccaccgagatctacactatagcctacactctttccctacacgacgctcttccgatctccctgctaatgtctgaggtccc

SEQ ID NO: 3681 - DNA, 92 bp, Artificial Sequence
  Description of Artificial Sequence: Synthetic primer
aatgatacggcgaccaccgagatctacactatagcctacactctttccctacacgacgctcttccgatctggactgggcttggtaacgtcct

SEQ ID NO: 3682 - DNA, 94 bp, Artificial Sequence
  Description of Artificial Sequence: Synthetic primer
aatgatacggcgaccaccgagatctacactatagcctacactctttccctacacgacgctcttccgatctggaaagcctcacctgtctacgttc

SEQ ID NO: 3683 - DNA, 93 bp, Artificial Sequence
  Description of Artificial Sequence: Synthetic primer
aatgatacggcgaccaccgagatctacactatagcctacactctttccctacacgacgctcttccgatctcccaagatttgatgggaagtggc

SEQ ID NO: 3684 - DNA, 93 bp, Artificial Sequence
  Description of Artificial Sequence: Synthetic primer
aatgatacggcgaccaccgagatctacactatagcctacactctttccctacacgacgctcttccgatctcctttccttccttccattcccac

SEQ ID NO: 3685 - DNA, 93 bp, Artificial Sequence
  Description of Artificial Sequence: Synthetic primer
aatgatacggcgaccaccgagatctacactatagcctacactctttccctacacgacgctcttccgatctccagtaccattcctcgactgcct

SEQ ID NO: 3686 - DNA, 94 bp, Artificial Sequence
  Description of Artificial Sequence: Synthetic primer
aatgatacggcgaccaccgagatctacactatagcctacactctttccctacacgacgctcttccgatctgcctgttccagtgtcttctctctc

SEQ ID NO: 3687 - DNA, 91 bp, Artificial Sequence
  Description of Artificial Sequence: Synthetic primer
aatgatacggcgaccaccgagatctacactatagcctacactctttccctacacgacgctcttccgatctggcttcaactcctcggacacc

SEQ ID NO: 3688 - DNA, 89 bp, Artificial Sequence
  Description of Artificial Sequence: Synthetic primer
aatgatacggcgaccaccgagatctacactatagcctacactctttccctacacgacgctcttccgatctcccatgccttccctggctg

SEQ ID NO: 3689 - DNA, 92 bp, Artificial Sequence
  Description of Artificial Sequence: Synthetic primer
aatgatacggcgaccaccgagatctacactatagcctacactctttccctacacgacgctcttccgatctcctttcctccctccttctgtcc

SEQ ID NO: 3690 - DNA, 89 bp, Artificial Sequence
  Description of Artificial Sequence: Synthetic primer
aatgatacggcgaccaccgagatctacactatagcctacactctttccctacacgacgctcttccgatcttcagcaccatcctccgtcc

SEQ ID NO: 3691 - DNA, 88 bp, Artificial Sequence
  Description of Artificial Sequence: Synthetic primer
aatgatacggcgaccaccgagatctacactatagcctacactctttccctacacgacgctcttccgatctagagggcatggcggtcac

SEQ ID NO: 3692 - DNA, 91 bp, Artificial Sequence
  Description of Artificial Sequence: Synthetic primer
aatgatacggcgaccaccgagatctacactatagcctacactctttccctacacgacgctcttccgatctgaagacccgcctaactgctcc

SEQ ID NO: 3693 - DNA, 90 bp, Artificial Sequence
  Description of Artificial Sequence: Synthetic primer
aatgatacggcgaccaccgagatctacactatagcctacactctttccctacacgacgctcttccgatctggctccactgagtcagcctg

SEQ ID NO: 3694 - DNA, 91 bp, Artificial Sequence
  Description of Artificial Sequence: Synthetic primer
aatgatacggcgaccaccgagatctacactatagcctacactctttccctacacgacgctcttccgatctgagctgggtctctctctgccc

SEQ ID NO: 3695 - DNA, 90 bp, Artificial Sequence
  Description of Artificial Sequence: Synthetic primer
aatgatacggcgaccaccgagatctacactatagcctacactctttccctacacgacgctcttccgatctatgggtggcacctgagccag

SEQ ID NO: 3696 - DNA, 92 bp, Artificial Sequence
  Description of Artificial Sequence: Synthetic primer
aatgatacggcgaccaccgagatctacactatagcctacactctttccctacacgacgctcttccgatctcatgacaggaggtcagagctgc

SEQ ID NO: 3697 - DNA, 90 bp, Artificial Sequence; identical to SEQ ID NO: 3695
  Description of Artificial Sequence: Synthetic primer

SEQ ID NO: 3698 - DNA, 91 bp, Artificial Sequence
  Description of Artificial Sequence: Synthetic primer
aatgatacggcgaccaccgagatctacactatagcctacactctttccctacacgacgctcttccgatcttcaagtggacggctccagaag

SEQ ID NO: 3699 - DNA, 91 bp, Artificial Sequence
  Description of Artificial Sequence: Synthetic primer
aatgatacggcgaccaccgagatctacactatagcctacactctttccctacacgacgctcttccgatctctgcccacagggatggtgaac

SEQ ID NO: 3700 - DNA, 93 bp, Artificial Sequence
  Description of Artificial Sequence: Synthetic primer
aatgatacggcgaccaccgagatctacactatagcctacactctttccctacacgacgctcttccgatctgaacacaaggaaggaccgctcac

SEQ ID NO: 3701 - DNA, 90 bp, Artificial Sequence
  Description of Artificial Sequence: Synthetic primer
aatgatacggcgaccaccgagatctacactatagcctacactctttccctacacgacgctcttccgatctggtgaaggaggtgctggact

SEQ ID NO: 3702 - DNA, 90 bp, Artificial Sequence
  Description of Artificial Sequence: Synthetic primer
aatgatacggcgaccaccgagatctacactatagcctacactctttccctacacgacgctcttccgatcttcctgacgttgggtcggctg

SEQ ID NO: 3703 - DNA, 91 bp, Artificial Sequence
  Description of Artificial Sequence: Synthetic primer
aatgatacggcgaccaccgagatctacactatagcctacactctttccctacacgacgctcttccgatctgagctgtgtgtccttagcgcc

SEQ ID NO: 3704 - DNA, 89 bp, Artificial Sequence
  Description of Artificial Sequence: Synthetic primer
aatgatacggcgaccaccgagatctacactatagcctacactctttccctacacgacgctcttccgatctcccaggacgggtgtgtgct

SEQ ID NO: 3705 - DNA, 89 bp, Artificial Sequence
  Description of Artificial Sequence: Synthetic primer
aatgatacggcgaccaccgagatctacactatagcctacactctttccctacacgacgctcttccgatctttccagccgcccgagattg

SEQ ID NO: 3706 - DNA, 91 bp, Artificial Sequence
  Description of Artificial Sequence: Synthetic primer
aatgatacggcgaccaccgagatctacactatagcctacactctttccctacacgacgctcttccgatctctgaccacgcctttcttccct

SEQ ID NO: 3707 - DNA, 89 bp, Artificial Sequence
  Description of Artificial Sequence: Synthetic primer
aatgatacggcgaccaccgagatctacactatagcctacactctttccctacacgacgctcttccgatctagctgacaggctcctcgcc

SEQ ID NO: 3708 - DNA, 89 bp, Artificial Sequence
  Description of Artificial Sequence: Synthetic primer
aatgatacggcgaccaccgagatctacactatagcctacactctttccctacacgacgctcttccgatctgccactgcttctgggcgtt

SEQ ID NO: 3709 - DNA, 89 bp, Artificial Sequence
  Description of Artificial Sequence: Synthetic primer
aatgatacggcgaccaccgagatctacactatagcctacactctttccctacacgacgctcttccgatctgctcaggccacacttgccg

SEQ ID NO: 3710 - DNA, 91 bp, Artificial Sequence
  Description of Artificial Sequence: Synthetic primer
aatgatacggcgaccaccgagatctacactatagcctacactctttccctacacgacgctcttccgatctcaactagagggcagccttgtg

SEQ ID NO: 3711 - DNA, 99 bp, Artificial Sequence
  Description of Artificial Sequence: Synthetic primer
aatgatacggcgaccaccgagatctacactatagcctacactctttccctacacgacgctcttccgatctcagttaaagatttcaccagtttttcaaca

SEQ ID NO: 3712 - DNA, 93 bp, Artificial Sequence
  Description of Artificial Sequence: Synthetic primer
aatgatacggcgaccaccgagatctacactatagcctacactctttccctacacgacgctcttccgatctctgttcaggttccagcagcaatt

SEQ ID NO: 3713 - DNA, 94 bp, Artificial Sequence
  Description of Artificial Sequence: Synthetic primer
aatgatacggcgaccaccgagatctacactatagcctacactctttccctacacgacgctcttccgatctctgccagcagttgatgagaaacaa

SEQ ID NO: 3714 - DNA, 96 bp, Artificial Sequence
  Description of Artificial Sequence: Synthetic primer
aatgatacggcgaccaccgagatctacactatagcctacactctttccctacacgacgctcttccgatctagactgagccattttcaaactcacac

SEQ ID NO: 3715 - DNA, 90 bp, Artificial Sequence
  Description of Artificial Sequence: Synthetic primer
aatgatacggcgaccaccgagatctacactatagcctacactctttccctacacgacgctcttccgatcttgtctggtcaacaagctgcg

SEQ ID NO: 3716 - DNA, 101 bp, Artificial Sequence
  Description of Artificial Sequence: Synthetic polynucleotide
aatgatacggcgaccaccgagatctacactatagcctacactctttccctacacgacgctcttccgatcttttagagcagcaaacaacttcttcagaaaag

SEQ ID NO: 3717 - DNA, 103 bp, Artificial Sequence
  Description of Artificial Sequence: Synthetic polynucleotide
aatgatacggcgaccaccgagatctacactatagcctacactctttccctacacgacgctcttccgatctggatgtagcctttatatttagtataattgaggt

SEQ ID NO: 3718 - DNA, 97 bp, Artificial Sequence
  Description of Artificial Sequence: Synthetic primer
aatgatacggcgaccaccgagatctacactatagcctacactctttccctacacgacgctcttccgatctgctaattgtatgtgtgtgtgtttctgt

SEQ ID NO: 3719 - DNA, 91 bp, Artificial Sequence
  Description of Artificial Sequence: Synthetic primer
aatgatacggcgaccaccgagatctacactatagcctacactctttccctacacgacgctcttccgatctggatggaatggtgatccacgc

SEQ ID NO: 3720 - DNA, 103 bp, Artificial Sequence
  Description of Artificial Sequence: Synthetic polynucleotide
aatgatacggcgaccaccgagatctacactatagcctacactctttccctacacgacgctcttccgatctataatgctatccatagcaatgaatttggtcttt

SEQ ID NO: 3721 - DNA, 102 bp, Artificial Sequence
  Description of Artificial Sequence: Synthetic polynucleotide
aatgatacggcgaccaccgagatctacactatagcctacactctttccctacacgacgctcttccgatctgtctcttttacatagagaaaatggacttagaa

SEQ ID NO: 3722 - DNA, 100 bp, Artificial Sequence
  Description of Artificial Sequence: Synthetic polynucleotide
aatgatacggcgaccaccgagatctacactatagcctacactctttccctacacgacgctcttccgatcttagtgagttttcggtgtaagagtaaaacta

SEQ ID NO: 3723 - DNA, 96 bp, Artificial Sequence
  Description of Artificial Sequence: Synthetic primer
aatgatacggcgaccaccgagatctacactatagcctacactctttccctacacgacgctcttccgatctttgggacctgtagttgaggctgtaat

SEQ ID NO: 3724 - DNA, 94 bp, Artificial Sequence
  Description of Artificial Sequence: Synthetic primer
aatgatacggcgaccaccgagatctacactatagcctacactctttccctacacgacgctcttccgatctgccgacaaaggaaactagaagcca

SEQ ID NO: 3725 - DNA, 95 bp, Artificial Sequence
  Description of Artificial Sequence: Synthetic primer
aatgatacggcgaccaccgagatctacactatagcctacactctttccctacacgacgctcttccgatctcctgtttctgttctctcttaccctg

SEQ ID NO: 3726 - DNA, 95 bp, Artificial Sequence
  Description of Artificial Sequence: Synthetic primer
aatgatacggcgaccaccgagatctacactatagcctacactctttccctacacgacgctcttccgatctcccatatctgggttcctattctccc

SEQ ID NO: 3727 - DNA, 96 bp, Artificial Sequence
  Description of Artificial Sequence: Synthetic primer
aatgatacggcgaccaccgagatctacactatagcctacactctttccctacacgacgctcttccgatctaatgacatgctttcccacacagctaa

SEQ ID NO: 3728 - DNA, 93 bp, Artificial Sequence
  Description of Artificial Sequence: Synthetic primer
aatgatacggcgaccaccgagatctacactatagcctacactctttccctacacgacgctcttccgatcttatgtgcctcagaaatcccatgg

SEQ ID NO: 3729 - DNA, 90 bp, Artificial Sequence
  Description of Artificial Sequence: Synthetic primer
aatgatacggcgaccaccgagatctacactatagcctacactctttccctacacgacgctcttccgatctggtgggaggctgtcagtggg

SEQ ID NO: 3730 - DNA, 89 bp, Artificial Sequence
  Description of Artificial Sequence: Synthetic primer
aatgatacggcgaccaccgagatctacactatagcctacactctttccctacacgacgctcttccgatctgggagtagggccaggaagg

SEQ ID NO: 3731 - DNA, 103 bp, Artificial Sequence
  Description of Artificial Sequence: Synthetic polynucleotide
aatgatacggcgaccaccgagatctacactatagcctacactctttccctacacgacgctcttccgatctccttagattaggtgtattaaatccattttcaac

SEQ ID NO: 3732 - DNA, 95 bp, Artificial Sequence
  Description of Artificial Sequence: Synthetic primer
aatgatacggcgaccaccgagatctacactatagcctacactctttccctacacgacgctcttccgatctgaatctgaggcataactgcaccctt

SEQ ID NO: 3733 - DNA, 89 bp, Artificial Sequence
  Description of Artificial Sequence: Synthetic primer
aatgatacggcgaccaccgagatctacactatagcctacactctttccctacacgacgctcttccgatctagtgtgcagggtggcaagt

SEQ ID NO: 3734 - DNA, 93 bp, Artificial Sequence
  Description of Artificial Sequence: Synthetic primer
aatgatacggcgaccaccgagatctacactatagcctacactctttccctacacgacgctcttccgatctccactgacaaccacccttaaccc

SEQ ID NO: 3735 - DNA, 89 bp, Artificial Sequence
  Description of Artificial Sequence: Synthetic primer
aatgatacggcgaccaccgagatctacactatagcctacactctttccctacacgacgctcttccgatctagcgcctcacaacctccgt

SEQ ID NO: 3736 - DNA, 92 bp, Artificial Sequence
  Description of Artificial Sequence: Synthetic primer
aatgatacggcgaccaccgagatctacactatagcctacactctttccctacacgacgctcttccgatctgccaggcattgaagtctcatgg

SEQ ID NO: 3737 - DNA, 94 bp, Artificial Sequence
  Description of Artificial Sequence: Synthetic primer
aatgatacggcgaccaccgagatctacactatagcctacactctttccctacacgacgctcttccgatctaagagcagaaagtcagtcccatgg

SEQ ID NO: 3738 - DNA, 92 bp, Artificial Sequence
  Description of Artificial Sequence: Synthetic primer
aatgatacggcgaccaccgagatctacactatagcctacactctttccctacacgacgctcttccgatctgaacctctggcaggagcaaagg

SEQ ID NO: 3739 - DNA, 95 bp, Artificial Sequence
  Description of Artificial Sequence: Synthetic primer
aatgatacggcgaccaccgagatctacactatagcctacactctttccctacacgacgctcttccgatctggactctgctatgcttttgtctggc

SEQ ID NO: 3740 - DNA, 96 bp, Artificial Sequence
  Description of Artificial Sequence: Synthetic primer
aatgatacggcgaccaccgagatctacactatagcctacactctttccctacacgacgctcttccgatctgagaggtgactgtccaggacctattg

SEQ ID NO: 3741 - DNA, 103 bp, Artificial Sequence
  Description of Artificial Sequence: Synthetic polynucleotide
aatgatacggcgaccaccgagatctacactatagcctacactctttccctacacgacgctcttccgatctacttactgtatgtagtcatcaaagaatatgaga

SEQ ID NO: 3742 - DNA, 100 bp, Artificial Sequence
  Description of Artificial Sequence: Synthetic polynucleotide
aatgatacggcgaccaccgagatctacactatagcctacactctttccctacacgacgctcttccgatctgttctttctttacgttctgctctttttgcc

SEQ ID NO: 3743 - DNA, 93 bp, Artificial Sequence
  Description of Artificial Sequence: Synthetic primer
aatgatacggcgaccaccgagatctacactatagcctacactctttccctacacgacgctcttccgatcttgcctttatcacccatgctggtt

SEQ ID NO: 3744 - DNA, 94 bp, Artificial Sequence
  Description of Artificial Sequence: Synthetic primer
aatgatacggcgaccaccgagatctacactatagcctacactctttccctacacgacgctcttccgatctttccaggcataacgaaactgtctt

SEQ ID NO: 3745 - DNA, 91 bp, Artificial Sequence
  Description of Artificial Sequence: Synthetic primer
aatgatacggcgaccaccgagatctacactatagcctacactctttccctacacgacgctcttccgatctgctgacagtggccttcatcac

SEQ ID NO: 3746 - DNA, 90 bp, Artificial Sequence
  Description of Artificial Sequence: Synthetic primer
aatgatacggcgaccaccgagatctacactatagcctacactctttccctacacgacgctcttccgatctgggcaaagtgagtgacctgc

SEQ ID NO: 3747 - DNA, 90 bp, Artificial Sequence
  Description of Artificial Sequence: Synthetic primer
aatgatacggcgaccaccgagatctacactatagcctacactctttccctacacgacgctcttccgatctctcatggacgggtgaggcgg

SEQ ID NO: 3748 - DNA, 93 bp, Artificial Sequence
  Description of Artificial Sequence: Synthetic primer
aatgatacggcgaccaccgagatctacactatagcctacactctttccctacacgacgctcttccgatcttgccttgctctctttctgtcctc

SEQ ID NO: 3749 - DNA, 90 bp, Artificial Sequence
  Description of Artificial Sequence: Synthetic primer
aatgatacggcgaccaccgagatctacactatagcctacactctttccctacacgacgctcttccgatctcccaccgggctcatgtgtca

SEQ ID NO: 3750 - DNA, 96 bp, Artificial Sequence
  Description of Artificial Sequence: Synthetic primer
aatgatacggcgaccaccgagatctacactatagcctacactctttccctacacgacgctcttccgatctacctctgtgatctgcttccttccttt

SEQ ID NO: 3751 - DNA, 98 bp, Artificial Sequence
  Description of Artificial Sequence: Synthetic primer
aatgatacggcgaccaccgagatctacactatagcctacactctttccctacacgacgctcttccgatctcttaacccttccctgttttgctcttttc

SEQ ID NO: 3752 - DNA, 99 bp, Artificial Sequence
  Description of Artificial Sequence: Synthetic primer
aatgatacggcgaccaccgagatctacactatagcctacactctttccctacacgacgctcttccgatctgctctctctctgtctctgtttttttattt

SEQ ID NO: 3753 - DNA, 99 bp, Artificial Sequence
  Description of Artificial Sequence: Synthetic primer
aatgatacggcgaccaccgagatctacactatagcctacactctttccctacacgacgctcttccgatcttgctctagcttagatgtctttccttttgc

SEQ ID NO: 3754 - DNA, 91 bp, Artificial Sequence
  Description of Artificial Sequence: Synthetic primer
aatgatacggcgaccaccgagatctacactatagcctacactctttccctacacgacgctcttccgatctctcctcacttggccctaaccc

SEQ ID NO: 3755 - DNA, 89 bp, Artificial Sequence
  Description of Artificial Sequence: Synthetic primer
aatgatacggcgaccaccgagatctacactatagcctacactctttccctacacgacgctcttccgatctgtggtctggatcgcggagg

SEQ ID NO: 3756 - DNA, 88 bp, Artificial Sequence
  Description of Artificial Sequence: Synthetic primer
aatgatacggcgaccaccgagatctacactatagcctacactctttccctacacgacgctcttccgatctcgtgctgcccgtatggct

SEQ ID NO: 3757 - DNA, 97 bp, Artificial Sequence
  Description of Artificial Sequence: Synthetic primer
aatgatacggcgaccaccgagatctacactatagcctacactctttccctacacgacgctcttccgatctctttaacaacctttgcttgtcccgata

SEQ ID NO: 3758 - DNA, 95 bp, Artificial Sequence
  Description of Artificial Sequence: Synthetic primer
aatgatacggcgaccaccgagatctacactatagcctacactctttccctacacgacgctcttccgatctctgaggatttggtttttgcccttcc

SEQ ID NO: 3759 - DNA, 91 bp, Artificial Sequence
  Description of Artificial Sequence: Synthetic primer
aatgatacggcgaccaccgagatctacactatagcctacactctttccctacacgacgctcttccgatcttgcctgggacactgaacggtc

SEQ ID NO: 3760 - DNA, 97 bp, Artificial Sequence
  Description of Artificial Sequence: Synthetic primer
aatgatacggcgaccaccgagatctacactatagcctacactctttccctacacgacgctcttccgatctccaatccctctcatcacaatttcattc

SEQ ID NO: 3761 - DNA, 95 bp, Artificial Sequence
  Description of Artificial Sequence: Synthetic primer
aatgatacggcgaccaccgagatctacactatagcctacactctttccctacacgacgctcttccgatctgccagcaatgagaagtgaacctaca

SEQ ID NO: 3762 - DNA, 91 bp, Artificial Sequence
  Description of Artificial Sequence: Synthetic primer
aatgatacggcgaccaccgagatctacactatagcctacactctttccctacacgacgctcttccgatctactggacagcgggcacactta

SEQ ID NO: 3763 - DNA, 91 bp, Artificial Sequence
  Description of Artificial Sequence: Synthetic primer
aatgatacggcgaccaccgagatctacactatagcctacactctttccctacacgacgctcttccgatctaagtaggaagaggcagtgcgg

SEQ ID NO: 3764 - DNA, 91 bp, Artificial Sequence
  Description of Artificial Sequence: Synthetic primer
aatgatacggcgaccaccgagatctacactatagcctacactctttccctacacgacgctcttccgatctttgctttgccatctccgcatt

SEQ ID NO: 3765 - DNA, 98 bp, Artificial Sequence
  Description of Artificial Sequence: Synthetic primer
aatgatacggcgaccaccgagatctacactatagcctacactctttccctacacgacgctcttccgatctgaaaggcaatggaatagagaaaacctta

SEQ ID NO: 3766 - DNA, 88 bp, Artificial Sequence
  Description of Artificial Sequence: Synthetic primer
aatgatacggcgaccaccgagatctacactatagcctacactctttccctacacgacgctcttccgatctacccagacgcagagccca

SEQ ID NO: 3767 - DNA, 93 bp, Artificial Sequence
  Description of Artificial Sequence: Synthetic primer
aatgatacggcgaccaccgagatctacactatagcctacactctttccctacacgacgctcttccgatctagaaggactccacttggttccgc

SEQ ID NO: 3768 - DNA, 100 bp, Artificial Sequence
  Description of Artificial Sequence: Synthetic polynucleotide
aatgatacggcgaccaccgagatctacactatagcctacactctttccctacacgacgctcttccgatctgagagagagacgaaatagaagctacgaaga

SEQ ID NO: 3769 - DNA, 91 bp, Artificial Sequence
  Description of Artificial Sequence: Synthetic primer
aatgatacggcgaccaccgagatctacactatagcctacactctttccctacacgacgctcttccgatctcctagagcggagagtccctgg

SEQ ID NO: 3770 - DNA, 89 bp, Artificial Sequence
  Description of Artificial Sequence: Synthetic primer
aatgatacggcgaccaccgagatctacactatagcctacactctttccctacacgacgctcttccgatctagcccatttgctgcggctc

SEQ ID NO: 3771 - DNA, 99 bp, Artificial Sequence
  Description of Artificial Sequence: Synthetic primer
aatgatacggcgaccaccgagatctacaccctatcctacactctttccctacacgacgctcttccgatctgtaatttactacctttcgttctgtagctc

SEQ ID NO: 3772 - DNA, 103 bp, Artificial Sequence
  Description of Artificial Sequence: Synthetic polynucleotide
aatgatacggcgaccaccgagatctacaccctatcctacactctttccctacacgacgctcttccgatctgacttacacacaaaagtaatatcacaacagaaa

SEQ ID NO: 3773 - DNA, 97 bp, Artificial Sequence
  Description of Artificial Sequence: Synthetic primer
aatgatacggcgaccaccgagatctacaccctatcctacactctttccctacacgacgctcttccgatctgcgacagtaatctgttaagccatttat

SEQ ID NO: 3774 - DNA, 99 bp, Artificial Sequence
  Description of Artificial Sequence: Synthetic primer
aatgatacggcgaccaccgagatctacaccctatcctacactctttccctacacgacgctcttccgatctgtgctttctttggtgaagtttcatttcat

SEQ ID NO: 3775 - DNA, 97 bp, Artificial Sequence
  Description of Artificial Sequence: Synthetic primer
aatgatacggcgaccaccgagatctacaccctatcctacactctttccctacacgacgctcttccgatctagcctgaagtacacagagaacaattct

SEQ ID NO: 3776 - DNA, 100 bp, Artificial Sequence
  Description of Artificial Sequence: Synthetic polynucleotide
aatgatacggcgaccaccgagatctacaccctatcctacactctttccctacacgacgctcttccgatcttttagttactgagtctaaaacatggtcttg

SEQ ID NO: 3777 - DNA, 103 bp, Artificial Sequence
  Description of Artificial Sequence: Synthetic polynucleotide
aatgatacggcgaccaccgagatctacaccctatcctacactctttccctacacgacgctcttccgatctgaagaagcaaattcaaaacagtaaacatttcct

SEQ ID NO: 3778 - DNA, 105 bp, Artificial Sequence
  Description of Artificial Sequence: Synthetic polynucleotide
aatgatacggcgaccaccgagatctacaccctatcctacactctttccctacacgacgctcttccgatctaaatttctaaatgtgacatgacctacttactgtac

SEQ ID NO: 3779 - DNA, 105 bp, Artificial Sequence
  Description of Artificial Sequence: Synthetic polynucleotide
aatgatacggcgaccaccgagatctacaccctatcctacactctttccctacacgacgctcttccgatctaaatgacactgaatgagaaaatggtaacactttac

SEQ ID NO: 3780 - DNA, 103 bp, Artificial Sequence
  Description of Artificial Sequence: Synthetic polynucleotide
aatgatacggcgaccaccgagatctacaccctatcctacactctttccctacacgacgctcttccgatctcagttaggtaaacttgcaggatactttgatatt

SEQ ID NO: 3781 - DNA, 98 bp, Artificial Sequence
  Description of Artificial Sequence: Synthetic primer
aatgatacggcgaccaccgagatctacaccctatcctacactctttccctacacgacgctcttccgatcttgtctgtgtgtgtttatctgtaagtcag

SEQ ID NO: 3782 - DNA, 100 bp, Artificial Sequence
  Description of Artificial Sequence: Synthetic polynucleotide
aatgatacggcgaccaccgagatctacaccctatcctacactctttccctacacgacgctcttccgatctataagtggagagagcctgataaaacaaaca

SEQ ID NO: 3783 - DNA, 103 bp, Artificial Sequence
  Description of Artificial Sequence: Synthetic polynucleotide
aatgatacggcgaccaccgagatctacaccctatcctacactctttccctacacgacgctcttccgatctagctactacccagctaaaattatcatctttgta

SEQ ID NO: 3784 - DNA, 100 bp, Artificial Sequence
  Description of Artificial Sequence: Synthetic polynucleotide
aatgatacggcgaccaccgagatctacaccctatcctacactctttccctacacgacgctcttccgatctgtcaaaagttgtctgaagaaatagttcttc

SEQ ID NO: 3785 - DNA, 103 bp, Artificial Sequence
  Description of Artificial Sequence: Synthetic polynucleotide
aatgatacggcgaccaccgagatctacaccctatcctacactctttccctacacgacgctcttccgatcttttctccttcctaacagtttaccaaagttgaat

SEQ ID NO: 3786 - DNA, 104 bp, Artificial Sequence
  Description of Artificial Sequence: Synthetic polynucleotide
aatgatacggcgaccaccgagatctacaccctatcctacactctttccctacacgacgctcttccgatctccggacaagagtttctgaatttgtaatcttaaag

SEQ ID NO: 3787 - DNA, 102 bp, Artificial Sequence
  Description of Artificial Sequence: Synthetic polynucleotide
aatgatacggcgaccaccgagatctacaccctatcctacactctttccctacacgacgctcttccgatctgtcttccaaacaaatgtaataattttcacagg

SEQ ID NO: 3788 - DNA, 104 bp, Artificial Sequence
  Description of Artificial Sequence: Synthetic polynucleotide
aatgatacggcgaccaccgagatctacaccctatcctacactctttccctacacgacgctcttccgatcttgacagagaaagatcctatctcaaaaaacaaaac

SEQ ID NO: 3789 - DNA, 100 bp, Artificial Sequence
  Description of Artificial Sequence: Synthetic polynucleotide
aatgatacggcgaccaccgagatctacaccctatcctacactctttccctacacgacgctcttccgatctcaaaatatgatagcaaaacaggaagcatac

SEQ ID NO: 3790 - DNA, 100 bp, Artificial Sequence
  Description of Artificial Sequence: Synthetic polynucleotide
aatgatacggcgaccaccgagatctacaccctatcctacactctttccctacacgacgctcttccgatctaggcctcttatactgccaaatcaatataaa

SEQ ID NO: 3791 - DNA, 97 bp, Artificial Sequence
  Description of Artificial Sequence: Synthetic primer
aatgatacggcgaccaccgagatctacaccctatcctacactctttccctacacgacgctcttccgatctagtcagcaacatcagataaaatccaag

SEQ ID NO: 3792 - DNA, 104 bp, Artificial Sequence
  Description of Artificial Sequence: Synthetic polynucleotide
aatgatacggcgaccaccgagatctacaccctatcctacactctttccctacacgacgctcttccgatctaatttcttacgatagtggtttcagaagttcaaga

SEQ ID NO: 3793 - DNA, 103 bp, Artificial Sequence
  Description of Artificial Sequence: Synthetic polynucleotide
aatgatacggcgaccaccgagatctacaccctatcctacactctttccctacacgacgctcttccgatcttagcaaaagaaaaataggaccacaaaatagact

SEQ ID NO: 3794 - DNA, 94 bp, Artificial Sequence
  Description of Artificial Sequence: Synthetic primer
aatgatacggcgaccaccgagatctacaccctatcctacactctttccctacacgacgctcttccgatcttgcaaaaactcacctcaagcaaag

SEQ ID NO: 3795 - DNA, 101 bp, Artificial Sequence
  Description of Artificial Sequence: Synthetic polynucleotide
aatgatacggcgaccaccgagatctacaccctatcctacactctttccctacacgacgctcttccgatctttactatgtaagacattctactgccatctgc

SEQ ID NO: 3796 - DNA, 103 bp, Artificial Sequence
  Description of Artificial Sequence: Synthetic polynucleotide
aatgatacggcgaccaccgagatctacaccctatcctacactctttccctacacgacgctcttccgatctttggtgaagtaatttatgggatattcatagcaa

SEQ ID NO: 3797 - DNA, 98 bp, Artificial Sequence
  Description of Artificial Sequence: Synthetic primer
aatgatacggcgaccaccgagatctacaccctatcctacactctttccctacacgacgctcttccgatctaattatttcacagtgacctaaggaagct

SEQ ID NO: 3798 - DNA, 94 bp, Artificial Sequence
  Description of Artificial Sequence: Synthetic primer
aatgatacggcgaccaccgagatctacaccctatcctacactctttccctacacgacgctcttccgatctatggtatgtgtgttgctggtgagg

SEQ ID NO: 3799 - DNA, 101 bp, Artificial Sequence
  Description of Artificial Sequence: Synthetic polynucleotide
aatgatacggcgaccaccgagatctacaccctatcctacactctttccctacacgacgctcttccgatctacttcacctcatcaaaatgacttctaatcac

SEQ ID NO: 3800 - DNA, 105 bp, Artificial Sequence
  Description of Artificial Sequence: Synthetic polynucleotide
aatgatacggcgaccaccgagatctacaccctatcctacactctttccctacacgacgctcttccgatctaggttatatctcatatcattcagggaatgaaaagt

SEQ ID NO: 3801 - DNA, 103 bp, Artificial Sequence
  Description of Artificial Sequence: Synthetic polynucleotide
aatgatacggcgaccaccgagatctacaccctatcctacactctttccctacacgacgctcttccgatctaaaacttgtgaagttagagctagttctctaagt

SEQ ID NO: 3802 - DNA, 99 bp, Artificial Sequence
  Description of Artificial Sequence: Synthetic primer
aatgatacggcgaccaccgagatctacaccctatcctacactctttccctacacgacgctcttccgatctttacagggcttttggaaagaatttctaaa

SEQ ID NO: 3803 - DNA, 104 bp, Artificial Sequence
  Description of Artificial Sequence: Synthetic polynucleotide
aatgatacggcgaccaccgagatctacaccctatcctacactctttccctacacgacgctcttccgatctgcaagaagaattttctgataggaatcctagaaaa

SEQ ID NO: 3804 - DNA, 99 bp, Artificial Sequence
  Description of Artificial Sequence: Synthetic primer
aatgatacggcgaccaccgagatctacaccctatcctacactctttccctacacgacgctcttccgatctgcaagaagaattttctgataggaatccta

SEQ ID NO: 3805 - DNA, 100 bp, Artificial Sequence
  Description of Artificial Sequence: Synthetic polynucleotide
aatgatacggcgaccaccgagatctacaccctatcctacactctttccctacacgacgctcttccgatctgcaaaaaaacaggaagaacaggatagaaag

SEQ ID NO: 3806 - DNA, 103 bp, Artificial Sequence
  Description of Artificial Sequence: Synthetic polynucleotide
aatgatacggcgaccaccgagatctacaccctatcctacactctttccctacacgacgctcttccgatctaataccattttgaagatgagtcagaaaattacc

SEQ ID NO: 3807 - DNA, 105 bp, Artificial Sequence
  Description of Artificial Sequence: Synthetic polynucleotide
aatgatacggcgaccaccgagatctacaccctatcctacactctttccctacacgacgctcttccgatcttctatcactaagtatttcaacaagtccaataccta

SEQ ID NO: 3808 - DNA, 103 bp, Artificial Sequence
  Description of Artificial Sequence: Synthetic polynucleotide
aatgatacggcgaccaccgagatctacaccctatcctacactctttccctacacgacgctcttccgatcttactgctagagcattacagatttttgaaaagta

SEQ ID NO: 3809 - DNA, 95 bp, Artificial Sequence
  Description of Artificial Sequence: Synthetic primer
aatgatacggcgaccaccgagatctacaccctatcctacactctttccctacacgacgctcttccgatctagaaacaggtagaaatagcccatgt

SEQ ID NO: 3810 - DNA, 95 bp, Artificial Sequence
  Description of Artificial Sequence: Synthetic primer
aatgatacggcgaccaccgagatctacaccctatcctacactctttccctacacgacgctcttccgatcttatgtgatccgcagttgactgaaat

SEQ ID NO: 3811 - DNA, 101 bp, Artificial Sequence
  Description of Artificial Sequence: Synthetic polynucleotide
aatgatacggcgaccaccgagatctacaccctatcctacactctttccctacacgacgctcttccgatctcattctccatgaatgtcatattgagattaca

SEQ ID NO: 3812 - DNA, 101 bp, Artificial Sequence
  Description of Artificial Sequence: Synthetic polynucleotide
aatgatacggcgaccaccgagatctacaccctatcctacactctttccctacacgacgctcttccgatctcaaacagaactgttttagatatgctgggtat

SEQ ID NO: 3813 - DNA, 103 bp, Artificial Sequence
  Description of Artificial Sequence: Synthetic polynucleotide
aatgatacggcgaccaccgagatctacaccctatcctacactctttccctacacgacgctcttccgatcttatcacagcactctttagataaacaggtcataa

SEQ ID NO: 3814 - DNA, 102 bp, Artificial Sequence
  Description of Artificial Sequence: Synthetic polynucleotide
aatgatacggcgaccaccgagatctacaccctatcctacactctttccctacacgacgctcttccgatcttttagtgggattccatcttaaatccatctttc

SEQ ID NO: 3815 - DNA, 97 bp, Artificial Sequence
  Description of Artificial Sequence: Synthetic primer
aatgatacggcgaccaccgagatctacaccctatcctacactctttccctacacgacgctcttccgatcttagatcctaaacgtaagaagcaacact

SEQ ID NO: 3816 - DNA, 102 bp, Artificial Sequence
  Description of Artificial Sequence: Synthetic polynucleotide
aatgatacggcgaccaccgagatctacaccctatcctacactctttccctacacgacgctcttccgatctatatacccttattgagacaatgccaacattaa

SEQ ID NO: 3817 - DNA, 105 bp, Artificial Sequence
  Description of Artificial Sequence: Synthetic polynucleotide
aatgatacggcgaccaccgagatctacaccctatcctacactctttccctacacgacgctcttccgatctcagtgtctataacaaaataacccaaagtatgagat

SEQ ID NO: 3818 - DNA, 101 bp, Artificial Sequence
  Description of Artificial Sequence: Synthetic polynucleotide
aatgatacggcgaccaccgagatctacaccctatcctacactctttccctacacgacgctcttccgatcttttacctagtaatgggttgtaacatcttccc

SEQ ID NO: 3819 - DNA, 100 bp, Artificial Sequence
  Description of Artificial Sequence: Synthetic polynucleotide
aatgatacggcgaccaccgagatctacaccctatcctacactctttccctacacgacgctcttccgatcttggctttaccaaatctgggaaaaaatgtac

SEQ ID NO: 3820 - DNA, 98 bp, Artificial Sequence
  Description of Artificial Sequence: Synthetic primer
aatgatacggcgaccaccgagatctacaccctatcctacactctttccctacacgacgctcttccgatcttgtttagaatgaggagagaggcaaaaaa

SEQ ID NO: 3821 - DNA, 103 bp, Artificial Sequence
  Description of Artificial Sequence: Synthetic polynucleotide
aatgatacggcgaccaccgagatctacaccctatcctacactctttccctacacgacgctcttccgatctctcaagttttcagaaaagaagccatgacattaa

SEQ ID NO: 3822 - DNA, 97 bp, Artificial Sequence
  Description of Artificial Sequence: Synthetic primer
aatgatacggcgaccaccgagatctacaccctatcctacactctttccctacacgacgctcttccgatctggtaacagaaaagctgcactttaggat

SEQ ID NO: 3823 - DNA, 99 bp, Artificial Sequence
  Description of Artificial Sequence: Synthetic primer
aatgatacggcgaccaccgagatctacaccctatcctacactctttccctacacgacgctcttccgatctaggaaagtcaagaggtaagatgacatagt

SEQ ID NO: 3824 - DNA, 98 bp, Artificial Sequence
  Description of Artificial Sequence: Synthetic primer
aatgatacggcgaccaccgagatctacaccctatcctacactctttccctacacgacgctcttccgatctaaataacagtaaaacactaatccagcca

SEQ ID NO: 3825 - DNA, 102 bp, Artificial Sequence
  Description of Artificial Sequence: Synthetic polynucleotide
aatgatacggcgaccaccgagatctacaccctatcctacactctttccctacacgacgctcttccgatctatcttgatgaaaagatgaagcatattcatgct

SEQ ID NO: 3826 - DNA, 99 bp, Artificial Sequence
  Description of Artificial Sequence: Synthetic primer
aatgatacggcgaccaccgagatctacaccctatcctacactctttccctacacgacgctcttccgatcttcataatttccagcaacttctactgcctt

SEQ ID NO: 3827 - DNA, 102 bp, Artificial Sequence
  Description of Artificial Sequence: Synthetic polynucleotide
aatgatacggcgaccaccgagatctacaccctatcctacactctttccctacacgacgctcttccgatctgaacataaaattgtcacttgtagaaacctagt

SEQ ID NO: 3828 - DNA, 98 bp, Artificial Sequence
  Description of Artificial Sequence: Synthetic primer
aatgatacggcgaccaccgagatctacaccctatcctacactctttccctacacgacgctcttccgatctcttatgtctaagtttttcaagcacaggg

SEQ ID NO: 3829 - DNA, 100 bp, Artificial Sequence
  Description of Artificial Sequence: Synthetic polynucleotide
aatgatacggcgaccaccgagatctacaccctatcctacactctttccctacacgacgctcttccgatctattgtggtttgattttcaggtttacttaca

SEQ ID NO: 3830 - DNA, 98 bp, Artificial Sequence
  Description of Artificial Sequence: Synthetic primer
aatgatacggcgaccaccgagatctacaccctatcctacactctttccctacacgacgctcttccgatcttagtcagaaattcatctctgtttgcatt

SEQ ID NO: 3831 - DNA, 102 bp, Artificial Sequence
  Description of Artificial Sequence: Synthetic polynucleotide
aatgatacggcgaccaccgagatctacaccctatcctacactctttccctacacgacgctcttccgatctttctaggaaagactgaatatcacacttctaaa

SEQ ID NO: 3832 - DNA, 101 bp, Artificial Sequence
  Description of Artificial Sequence: Synthetic polynucleotide
aatgatacggcgaccaccgagatctacaccctatcctacactctttccctacacgacgctcttccgatcttctacagagagtaacacagcaagaaagtaac

SEQ ID NO: 3833 - DNA, 103 bp, Artificial Sequence
  Description of Artificial Sequence: Synthetic polynucleotide
aatgatacggcgaccaccgagatctacaccctatcctacactctttccctacacgacgctcttccgatctggcaaaggaaatataatactgagaaattatagg

SEQ ID NO: 3834 - DNA, 99 bp, Artificial Sequence
  Description of Artificial Sequence: Synthetic primer
aatgatacggcgaccaccgagatctacaccctatcctacactctttccctacacgacgctcttccgatctcatcactaaaactctaagggctaagccag

SEQ ID NO: 3835 - DNA, 98 bp, Artificial Sequence
  Description of Artificial Sequence: Synthetic primer
aatgatacggcgaccaccgagatctacaccctatcctacactctttccctacacgacgctcttccgatctatgtttttggtgaactaacagaagtaca

SEQ ID NO: 3836 - DNA, 103 bp, Artificial Sequence
  Description of Artificial Sequence: Synthetic polynucleotide
aatgatacggcgaccaccgagatctacaccctatcctacactctttccctacacgacgctcttccgatctttacaataacctttaattttgggtgtcactcac

SEQ ID NO: 3837 - DNA, 100 bp, Artificial Sequence
  Description of Artificial Sequence: Synthetic polynucleotide
aatgatacggcgaccaccgagatctacaccctatcctacactctttccctacacgacgctcttccgatctgccaaacaacaaagtgctcaatctactata

SEQ ID NO: 3838 - DNA, 100 bp, Artificial Sequence
  Description of Artificial Sequence: Synthetic polynucleotide
aatgatacggcgaccaccgagatctacaccctatcctacactctttccctacacgacgctcttccgatctggcaaacaacattccatgatgaccaaatat

SEQ ID NO: 3839 - DNA, 96 bp, Artificial Sequence
  Description of Artificial Sequence: Synthetic primer
aatgatacggcgaccaccgagatctacaccctatcctacactctttccctacacgacgctcttccgatctcccagcccatgtaattttgacatcaa

SEQ ID NO: 3840 - DNA, 104 bp, Artificial Sequence
  Description of Artificial Sequence: Synthetic polynucleotide
aatgatacggcgaccaccgagatctacaccctatcctacactctttccctacacgacgctcttccgatctagtctacctggtaagaaaaaaaataaagtcttcc

SEQ ID NO: 3841 - DNA, 97 bp, Artificial Sequence
  Description of Artificial Sequence: Synthetic primer
aatgatacggcgaccaccgagatctacaccctatcctacactctttccctacacgacgctcttccgatctcattcttggtcatctgcattcagagta

SEQ ID NO: 3842 - DNA, 101 bp, Artificial Sequence
  Description of Artificial Sequence: Synthetic polynucleotide
aatgatacggcgaccaccgagatctacaccctatcctacactctttccctacacgacgctcttccgatctatttctaaaggctgaatgaaagggtaattca

SEQ ID NO: 3843 - DNA, 97 bp, Artificial Sequence
  Description of Artificial Sequence: Synthetic primer
aatgatacggcgaccaccgagatctacaccctatcctacactctttccctacacgacgctcttccgatcttgcatgaggaaaaccatgagcagaaat

SEQ ID NO: 3844 - DNA, 89 bp, Artificial Sequence
  Description of Artificial Sequence: Synthetic primer
aatgatacggcgaccaccgagatctacaccctatcctacactctttccctacacgacgctcttccgatctcggctactcagcccaaccc

SEQ ID NO: 3845 - DNA, 95 bp, Artificial Sequence
  Description of Artificial Sequence: Synthetic primer
aatgatacggcgaccaccgagatctacaccctatcctacactctttccctacacgacgctcttccgatcttctatctcctgcaaccaccactagc

SEQ ID NO: 3846 - DNA, 91 bp, Artificial Sequence
  Description of Artificial Sequence: Synthetic primer
aatgatacggcgaccaccgagatctacaccctatcctacactctttccctacacgacgctcttccgatcttgtagttgcttgggacccagc

SEQ ID NO: 3847 - DNA, 89 bp, Artificial Sequence
  Description of Artificial Sequence: Synthetic primer
aatgatacggcgaccaccgagatctacaccctatcctacactctttccctacacgacgctcttccgatctccgacagcaggacctctgg

SEQ ID NO: 3848 - DNA, 91 bp, Artificial Sequence
  Description of Artificial Sequence: Synthetic primer
aatgatacggcgaccaccgagatctacaccctatcctacactctttccctacacgacgctcttccgatctgtcggccaccgttgaatgatg

SEQ ID NO: 3849 - DNA, 91 bp, Artificial Sequence
  Description of Artificial Sequence: Synthetic primer
aatgatacggcgaccaccgagatctacaccctatcctacactctttccctacacgacgctcttccgatcttaatgccagcagacgccttgc

SEQ ID NO: 3850 - DNA, 90 bp, Artificial Sequence
  Description of Artificial Sequence: Synthetic primer
aatgatacggcgaccaccgagatctacaccctatcctacactctttccctacacgacgctcttccgatctcggcgcgagaccctctcttc

SEQ ID NO: 3851 - DNA, 90 bp, Artificial Sequence
  Description of Artificial Sequence: Synthetic primer
aatgatacggcgaccaccgagatctacaccctatcctacactctttccctacacgacgctcttccgatctccacgccctgtgactccatg

SEQ ID NO: 3852 - DNA, 97 bp, Artificial Sequence
  Description of Artificial Sequence: Synthetic primer
aatgatacggcgaccaccgagatctacaccctatcctacactctttccctacacgacgctcttccgatctgaggcagaaaaaaaccctcctgtagtc

SEQ ID NO: 3853 - DNA, 94 bp, Artificial Sequence
  Description of Artificial Sequence: Synthetic primer
aatgatacggcgaccaccgagatctacaccctatcctacactctttccctacacgacgctcttccgatctactcgtgagaacaggctgaggaag

SEQ ID NO: 3854 - DNA, 90 bp, Artificial Sequence
  Description of Artificial Sequence: Synthetic primer
aatgatacggcgaccaccgagatctacaccctatcctacactctttccctacacgacgctcttccgatctcagtcccacatggctgccct

SEQ ID NO: 3855 - DNA, 89 bp, Artificial Sequence
  Description of Artificial Sequence: Synthetic primer
aatgatacggcgaccaccgagatctacaccctatcctacactctttccctacacgacgctcttccgatctagcctctggcagggaaggg

SEQ ID NO: 3856 - DNA, 90 bp, Artificial Sequence
  Description of Artificial Sequence: Synthetic primer
aatgatacggcgaccaccgagatctacaccctatcctacactctttccctacacgacgctcttccgatctgctgatgtctcggccctctt

SEQ ID NO: 3857 - DNA, 93 bp, Artificial Sequence
  Description of Artificial Sequence: Synthetic primer
aatgatacggcgaccaccgagatctacaccctatcctacactctttccctacacgacgctcttccgatctctttgaagacctcatcagcagct

SEQ ID NO: 3858 - DNA, 88 bp, Artificial Sequence
  Description of Artificial Sequence: Synthetic primer
aatgatacggcgaccaccgagatctacaccctatcctacactctttccctacacgacgctcttccgatctacggcttggcggactgtg

SEQ ID NO: 3859 - DNA, 90 bp, Artificial Sequence
  Description of Artificial Sequence: Synthetic primer
aatgatacggcgaccaccgagatctacaccctatcctacactctttccctacacgacgctcttccgatctcgacgggcctgacacctgac

SEQ ID NO: 3860 - DNA, 92 bp, Artificial Sequence
  Description of Artificial Sequence: Synthetic primer
aatgatacggcgaccaccgagatctacaccctatcctacactctttccctacacgacgctcttccgatctctgagctgtctacacccacaga

SEQ ID NO: 3861 - DNA, 89 bp, Artificial Sequence
  Description of Artificial Sequence: Synthetic primer
aatgatacggcgaccaccgagatctacaccctatcctacactctttccctacacgacgctcttccgatctgtcccgtctgcccacctct

SEQ ID NO: 3862 - DNA, 92 bp, Artificial Sequence
  Description of Artificial Sequence: Synthetic primer
aatgatacggcgaccaccgagatctacaccctatcctacactctttccctacacgacgctcttccgatctggtaccgacactgtggccttgt

SEQ ID NO: 3863 - DNA, 94 bp, Artificial Sequence
  Description of Artificial Sequence: Synthetic primer
aatgatacggcgaccaccgagatctacaccctatcctacactctttccctacacgacgctcttccgatctggtcatgtacgagatgatgtgcgg

SEQ ID NO: 3864 - DNA, 89 bp, Artificial Sequence
  Description of Artificial Sequence: Synthetic primer
aatgatacggcgaccaccgagatctacaccctatcctacactctttccctacacgacgctcttccgatcttggcggcactgacctgagg

SEQ ID NO: 3865 - DNA, 91 bp, Artificial Sequence
  Description of Artificial Sequence: Synthetic primer
aatgatacggcgaccaccgagatctacaccctatcctacactctttccctacacgacgctcttccgatctttgatgccgagtcctgcccat

SEQ ID NO: 3866 - DNA, 89 bp, Artificial Sequence
  Description of Artificial Sequence: Synthetic primer
aatgatacggcgaccaccgagatctacaccctatcctacactctttccctacacgacgctcttccgatctccacggctgtgcctcaggt

SEQ ID NO: 3867 - DNA, 96 bp, Artificial Sequence
  Description of Artificial Sequence: Synthetic primer
aatgatacggcgaccaccgagatctacaccctatcctacactctttccctacacgacgctcttccgatctcaaggacgggcacattaagatcacag

SEQ ID NO: 3868 - DNA, 89 bp, Artificial Sequence; identical to SEQ ID NO: 3866
  Description of Artificial Sequence: Synthetic primer

SEQ ID NO: 3869 - DNA, 90 bp, Artificial Sequence
  Description of Artificial Sequence: Synthetic primer
aatgatacggcgaccaccgagatctacaccctatcctacactctttccctacacgacgctcttccgatctatcaagcagcgtggtgtcgg

SEQ ID NO: 3870 - DNA, 91 bp, Artificial Sequence
  Description of Artificial Sequence: Synthetic primer
aatgatacggcgaccaccgagatctacaccctatcctacactctttccctacacgacgctcttccgatcttcacccagccctgctttacag

SEQ ID NO: 3871 - DNA, 89 bp, Artificial Sequence
  Description of Artificial Sequence: Synthetic primer
aatgatacggcgaccaccgagatctacaccctatcctacactctttccctacacgacgctcttccgatctccgcttgctgaccctggtg

SEQ ID NO: 3872 - DNA, 89 bp, Artificial Sequence
  Description of Artificial Sequence: Synthetic primer
aatgatacggcgaccaccgagatctacaccctatcctacactctttccctacacgacgctcttccgatctgcctcacctgacctcctgc

SEQ ID NO: 3873 - DNA, 89 bp, Artificial Sequence
  Description of Artificial Sequence: Synthetic primer
aatgatacggcgaccaccgagatctacaccctatcctacactctttccctacacgacgctcttccgatctgcacgcagacagaggctct

SEQ ID NO: 3874 - DNA, 90 bp, Artificial Sequence
  Description of Artificial Sequence: Synthetic primer
aatgatacggcgaccaccgagatctacaccctatcctacactctttccctacacgacgctcttccgatctcaccacccgcacgtctgtag

SEQ ID NO: 3875 - DNA, 90 bp, Artificial Sequence
  Description of Artificial Sequence: Synthetic primer
aatgatacggcgaccaccgagatctacaccctatcctacactctttccctacacgacgctcttccgatctcctgagaggagcgcgtgagc

SEQ ID NO: 3876 - DNA, 92 bp, Artificial Sequence
  Description of Artificial Sequence: Synthetic primer
aatgatacggcgaccaccgagatctacaccctatcctacactctttccctacacgacgctcttccgatctgctggagggaagctgtactgtc

SEQ ID NO: 3877 - DNA, 98 bp, Artificial Sequence
  Description of Artificial Sequence: Synthetic primer
aatgatacggcgaccaccgagatctacaccctatcctacactctttccctacacgacgctcttccgatctagatccaacattttttgtctctgattca

SEQ ID NO: 3878 - DNA, 94 bp, Artificial Sequence
  Description of Artificial Sequence: Synthetic primer
aatgatacggcgaccaccgagatctacaccctatcctacactctttccctacacgacgctcttccgatctttcgcaccctcaacgtattcgttg

SEQ ID NO: 3879 - DNA, 94 bp, Artificial Sequence
  Description of Artificial Sequence: Synthetic primer
aatgatacggcgaccaccgagatctacaccctatcctacactctttccctacacgacgctcttccgatcttgaatgtgggtgggtgtgtctata

SEQ ID NO: 3880 - DNA, 97 bp, Artificial Sequence
  Description of Artificial Sequence: Synthetic primer
aatgatacggcgaccaccgagatctacaccctatcctacactctttccctacacgacgctcttccgatctatgcttaatgccatctccagatcctag

SEQ ID NO: 3881 - DNA, 97 bp, Artificial Sequence
  Description of Artificial Sequence: Synthetic primer
aatgatacggcgaccaccgagatctacaccctatcctacactctttccctacacgacgctcttccgatctttggagataaaatcctagtgatggccg

SEQ ID NO: 3882 - DNA, 90 bp, Artificial Sequence
  Description of Artificial Sequence: Synthetic primer
aatgatacggcgaccaccgagatctacaccctatcctacactctttccctacacgacgctcttccgatctcagtggcccgcttctgtctc

SEQ ID NO: 3883 - DNA, 100 bp, Artificial Sequence
  Description of Artificial Sequence: Synthetic polynucleotide
aatgatacggcgaccaccgagatctacaccctatcctacactctttccctacacgacgctcttccgatctgactcagctcagttaattttggttacatcc

SEQ ID NO: 3884 - DNA, 91 bp, Artificial Sequence
  Description of Artificial Sequence: Synthetic primer
aatgatacggcgaccaccgagatctacaccctatcctacactctttccctacacgacgctcttccgatctctgcagttctcagctcacagc

SEQ ID NO: 3885 - DNA, 95 bp, Artificial Sequence
  Description of Artificial Sequence: Synthetic primer
aatgatacggcgaccaccgagatctacaccctatcctacactctttccctacacgacgctcttccgatcttgtttgactctgtctcctcttgtct

SEQ ID NO: 3886 - DNA, 90 bp, Artificial Sequence
  Description of Artificial Sequence: Synthetic primer
aatgatacggcgaccaccgagatctacaccctatcctacactctttccctacacgacgctcttccgatcttagtgcttcaagggccaggc

SEQ ID NO: 3887 - DNA, 94 bp, Artificial Sequence
  Description of Artificial Sequence: Synthetic primer
aatgatacggcgaccaccgagatctacaccctatcctacactctttccctacacgacgctcttccgatctaactcaaaggagacctggtgtggt

SEQ ID NO: 3888 - DNA, 92 bp, Artificial Sequence
  Description of Artificial Sequence: Synthetic primer
aatgatacggcgaccaccgagatctacaccctatcctacactctttccctacacgacgctcttccgatctctgaccctccctccttgtcact

SEQ ID NO: 3889 - DNA, 95 bp, Artificial Sequence
  Description of Artificial Sequence: Synthetic primer
aatgatacggcgaccaccgagatctacaccctatcctacactctttccctacacgacgctcttccgatcttgttaaactctgctctggtttgcta

SEQ ID NO: 3890 - DNA, 94 bp, Artificial Sequence
  Description of Artificial Sequence: Synthetic primer
aatgatacggcgaccaccgagatctacaccctatcctacactctttccctacacgacgctcttccgatcttcacgcaggttccctatctcttcc

SEQ ID NO: 3891 - DNA, 93 bp, Artificial Sequence
  Description of Artificial Sequence: Synthetic primer
aatgatacggcgaccaccgagatctacaccctatcctacactctttccctacacgacgctcttccgatctcacagctcggtttctcaatgtct

SEQ ID NO: 3892 - DNA, 95 bp, Artificial Sequence
  Description of Artificial Sequence: Synthetic primer
aatgatacggcgaccaccgagatctacaccctatcctacactctttccctacacgacgctcttccgatctggccacaaacctaacgtgctttttg

SEQ ID NO: 3893 - DNA, 92 bp, Artificial Sequence
  Description of Artificial Sequence: Synthetic primer
aatgatacggcgaccaccgagatctacaccctatcctacactctttccctacacgacgctcttccgatctcttcataccacagcgggagcca

SEQ ID NO: 3894 - DNA, 94 bp, Artificial Sequence
  Description of Artificial Sequence: Synthetic primer
aatgatacggcgaccaccgagatctacaccctatcctacactctttccctacacgacgctcttccgatcttgagtgactgcctctcctcttgtg

SEQ ID NO: 3895 - DNA, 96 bp, Artificial Sequence
  Description of Artificial Sequence: Synthetic primer
aatgatacggcgaccaccgagatctacaccctatcctacactctttccctacacgacgctcttccgatctagaatacagcacccaaatcaagaaac

SEQ ID NO: 3896 - DNA, 96 bp, Artificial Sequence
  Description of Artificial Sequence: Synthetic primer
aatgatacggcgaccaccgagatctacaccctatcctacactctttccctacacgacgctcttccgatctcctcacacacattcctcttgatgtgt

SEQ ID NO: 3897 - DNA, 94 bp, Artificial Sequence
  Description of Artificial Sequence: Synthetic primer
aatgatacggcgaccaccgagatctacaccctatcctacactctttccctacacgacgctcttccgatctaccttgtcctctgactcttctcgc

SEQ ID NO: 3898 - DNA, 95 bp, Artificial Sequence
  Description of Artificial Sequence: Synthetic primer
aatgatacggcgaccaccgagatctacaccctatcctacactctttccctacacgacgctcttccgatctcgtgcttgtgattcttttcctctct

SEQ ID NO: 3899 - DNA, 98 bp, Artificial Sequence
  Description of Artificial Sequence: Synthetic primer
aatgatacggcgaccaccgagatctacaccctatcctacactctttccctacacgacgctcttccgatctttgcctttagtggtcctgaaaatgatgg

SEQ ID NO: 3900 - DNA, 91 bp, Artificial Sequence
  Description of Artificial Sequence: Synthetic primer
aatgatacggcgaccaccgagatctacaccctatcctacactctttccctacacgacgctcttccgatcttgtgtctgtgtgctctccagg

SEQ ID NO: 3901 - DNA, 100 bp, Artificial Sequence
  Description of Artificial Sequence: Synthetic polynucleotide
aatgatacggcgaccaccgagatctacaccctatcctacactctttccctacacgacgctcttccgatcttcatatctgtttctctatgcttttctcctc

SEQ ID NO: 3902 - DNA, 94 bp, Artificial Sequence
  Description of Artificial Sequence: Synthetic primer
aatgatacggcgaccaccgagatctacaccctatcctacactctttccctacacgacgctcttccgatctgcagattcgttttccctgtctctt

SEQ ID NO: 3903 - DNA, 98 bp, Artificial Sequence
  Description of Artificial Sequence: Synthetic primer
aatgatacggcgaccaccgagatctacaccctatcctacactctttccctacacgacgctcttccgatcttggttttttccattgacccttggctatt

SEQ ID NO: 3904 - DNA, 103 bp, Artificial Sequence
  Description of Artificial Sequence: Synthetic polynucleotide
aatgatacggcgaccaccgagatctacaccctatcctacactctttccctacacgacgctcttccgatctcaagcacatggatcagtgttttctttattttta

SEQ ID NO: 3905 - DNA, 90 bp, Artificial Sequence
  Description of Artificial Sequence: Synthetic primer
aatgatacggcgaccaccgagatctacaccctatcctacactctttccctacacgacgctcttccgatctggcgaggaggcgatcttgga

SEQ ID NO: 3906 - DNA, 92 bp, Artificial Sequence
  Description of Artificial Sequence: Synthetic primer
aatgatacggcgaccaccgagatctacaccctatcctacactctttccctacacgacgctcttccgatctagagcagtgtaaacggcctcct

SEQ ID NO: 3907 - DNA, 103 bp, Artificial Sequence
  Description of Artificial Sequence: Synthetic polynucleotide
aatgatacggcgaccaccgagatctacaccctatcctacactctttccctacacgacgctcttccgatctaagtttacaagagggaatactgaataaaaatgg

SEQ ID NO: 3908 - DNA, 96 bp, Artificial Sequence
  Description of Artificial Sequence: Synthetic primer
aatgatacggcgaccaccgagatctacaccctatcctacactctttccctacacgacgctcttccgatctacacacctaaagatgacaatttgagc

SEQ ID NO: 3909 - DNA, 104 bp, Artificial Sequence
  Description of Artificial Sequence: Synthetic polynucleotide
aatgatacggcgaccaccgagatctacaccctatcctacactctttccctacacgacgctcttccgatctgttttactccagggaaattactgctatctaagtt

SEQ ID NO: 3910 - DNA, 103 bp, Artificial Sequence
  Description of Artificial Sequence: Synthetic polynucleotide
aatgatacggcgaccaccgagatctacaccctatcctacactctttccctacacgacgctcttccgatcttacaaaataacaataaactggagtacacaaggc

SEQ ID NO: 3911 - DNA, 101 bp, Artificial Sequence
  Description of Artificial Sequence: Synthetic polynucleotide
aatgatacggcgaccaccgagatctacaccctatcctacactctttccctacacgacgctcttccgatctagtttcaaataagttgtactgccaagttact

SEQ ID NO: 3912 - DNA, 101 bp, Artificial Sequence
  Description of Artificial Sequence: Synthetic polynucleotide
aatgatacggcgaccaccgagatctacaccctatcctacactctttccctacacgacgctcttccgatctttcattttattcctaatagctcttcgctgtt

SEQ ID NO: 3913 - DNA, 103 bp, Artificial Sequence
  Description of Artificial Sequence: Synthetic polynucleotide
aatgatacggcgaccaccgagatctacaccctatcctacactctttccctacacgacgctcttccgatctctcagaataactacctatttttatacccacaaa

SEQ ID NO: 3914 - DNA, 100 bp, Artificial Sequence
  Description of Artificial Sequence: Synthetic polynucleotide
aatgatacggcgaccaccgagatctacaccctatcctacactctttccctacacgacgctcttccgatctaccatcttgcttcatacttttctgatattt

SEQ ID NO: 3915 - DNA, 97 bp, Artificial Sequence
  Description of Artificial Sequence: Synthetic primer
aatgatacggcgaccaccgagatctacaccctatcctacactctttccctacacgacgctcttccgatctcttagcaaagtagtcatggcattagtg

SEQ ID NO: 3916 - DNA, 94 bp, Artificial Sequence
  Description of Artificial Sequence: Synthetic primer
aatgatacggcgaccaccgagatctacaccctatcctacactctttccctacacgacgctcttccgatctgccatgtaaaagctggatgaggag

SEQ ID NO: 3917 - DNA, 95 bp, Artificial Sequence
  Description of Artificial Sequence: Synthetic primer
aatgatacggcgaccaccgagatctacaccctatcctacactctttccctacacgacgctcttccgatctttgctttgaaacatgcactacgatg

SEQ ID NO: 3918 - DNA, 102 bp, Artificial Sequence
  Description of Artificial Sequence: Synthetic polynucleotide
aatgatacggcgaccaccgagatctacaccctatcctacactctttccctacacgacgctcttccgatcttccaccagtaattgtctatgtcattaaaaaac

SEQ ID NO: 3919 - DNA, 103 bp, Artificial Sequence
  Description of Artificial Sequence: Synthetic polynucleotide
aatgatacggcgaccaccgagatctacaccctatcctacactctttccctacacgacgctcttccgatcttgaaagtaaattaactcatacctgagctatctt

SEQ ID NO: 3920 - DNA, 103 bp, Artificial Sequence
  Description of Artificial Sequence: Synthetic polynucleotide
aatgatacggcgaccaccgagatctacaccctatcctacactctttccctacacgacgctcttccgatcttgcctcaaagaaaaagagaaaaaagaaaaacag

SEQ ID NO: 3921 - DNA, 97 bp, Artificial Sequence
  Description of Artificial Sequence: Synthetic primer
aatgatacggcgaccaccgagatctacaccctatcctacactctttccctacacgacgctcttccgatctggcagcaaaaaaaagccaaacatgaaa

SEQ ID NO: 3922 - DNA, 98 bp, Artificial Sequence
  Description of Artificial Sequence: Synthetic primer
aatgatacggcgaccaccgagatctacaccctatcctacactctttccctacacgacgctcttccgatctgctgacaaattccataaggcactcaata

SEQ ID NO: 3923 - DNA, 105 bp, Artificial Sequence
  Description of Artificial Sequence: Synthetic polynucleotide
aatgatacggcgaccaccgagatctacaccctatcctacactctttccctacacgacgctcttccgatctcattgcttacaattaggtctttttgagagtatgaa

SEQ ID NO: 3924 - DNA, 98 bp, Artificial Sequence
  Description of Artificial Sequence: Synthetic primer
aatgatacggcgaccaccgagatctacaccctatcctacactctttccctacacgacgctcttccgatctggcctatttgccatgagattccttaaag

SEQ ID NO: 3925 - DNA, 96 bp, Artificial Sequence
  Description of Artificial Sequence: Synthetic primer
aatgatacggcgaccaccgagatctacaccctatcctacactctttccctacacgacgctcttccgatctgcagcagagcttcttctaagtgcatt

SEQ ID NO: 3926 - DNA, 96 bp, Artificial Sequence
  Description of Artificial Sequence: Synthetic primer
aatgatacggcgaccaccgagatctacaccctatcctacactctttccctacacgacgctcttccgatcttcgatttgtttctgaaccattggctc

SEQ ID NO: 3927 - DNA, 92 bp, Artificial Sequence
  Description of Artificial Sequence: Synthetic primer
aatgatacggcgaccaccgagatctacaccctatcctacactctttccctacacgacgctcttccgatctttcgctcacaggatcttcagct

SEQ ID NO: 3928 - DNA, 91 bp, Artificial Sequence
  Description of Artificial Sequence: Synthetic primer
aatgatacggcgaccaccgagatctacaccctatcctacactctttccctacacgacgctcttccgatctctcatcgaggctcagagcact

SEQ ID NO: 3929 - DNA, 102 bp, Artificial Sequence
  Description of Artificial Sequence: Synthetic polynucleotide
aatgatacggcgaccaccgagatctacaccctatcctacactctttccctacacgacgctcttccgatcttctgtaggaatggtatctcgtttttcaaattc

SEQ ID NO: 3930 - DNA, 103 bp, Artificial Sequence
  Description of Artificial Sequence: Synthetic polynucleotide
aatgatacggcgaccaccgagatctacaccctatcctacactctttccctacacgacgctcttccgatctccttattttcttttgcctttcttaattcagcct

SEQ ID NO: 3931 - DNA, 100 bp, Artificial Sequence
  Description of Artificial Sequence: Synthetic polynucleotide
aatgatacggcgaccaccgagatctacaccctatcctacactctttccctacacgacgctcttccgatctttctgaatctggtctctgtatatctttcaa

SEQ ID NO: 3932 - DNA, 91 bp, Artificial Sequence
  Description of Artificial Sequence: Synthetic primer
aatgatacggcgaccaccgagatctacaccctatcctacactctttccctacacgacgctcttccgatctcctctaggagaagtggtggct

SEQ ID NO: 3933 - DNA, 99 bp, Artificial Sequence
  Description of Artificial Sequence: Synthetic primer
aatgatacggcgaccaccgagatctacaccctatcctacactctttccctacacgacgctcttccgatcttgatggagaaagagattcaaatgaagcag

SEQ ID NO: 3934 - DNA, 97 bp, Artificial Sequence
  Description of Artificial Sequence: Synthetic primer
aatgatacggcgaccaccgagatctacaccctatcctacactctttccctacacgacgctcttccgatctattgttaatgggacagtcctcaattct

SEQ ID NO: 3935 - DNA, 103 bp, Artificial Sequence
  Description of Artificial Sequence: Synthetic polynucleotide
aatgatacggcgaccaccgagatctacaccctatcctacactctttccctacacgacgctcttccgatctcatagaattttcttagtttcattcttcctctct

SEQ ID NO: 3936 - DNA, 98 bp, Artificial Sequence
  Description of Artificial Sequence: Synthetic primer
aatgatacggcgaccaccgagatctacaccctatcctacactctttccctacacgacgctcttccgatctaattcacattccctgactttgtaacaga

SEQ ID NO: 3937 - DNA, 97 bp, Artificial Sequence
  Description of Artificial Sequence: Synthetic primer
aatgatacggcgaccaccgagatctacaccctatcctacactctttccctacacgacgctcttccgatcttgatcataaaacgagaagcacatcaac

SEQ ID NO: 3938 - DNA, 99 bp, Artificial Sequence
  Description of Artificial Sequence: Synthetic primer
aatgatacggcgaccaccgagatctacaccctatcctacactctttccctacacgacgctcttccgatcttgtgttcctttcggaagagatgtctaata

SEQ ID NO: 3939 - DNA, 100 bp, Artificial Sequence
  Description of Artificial Sequence: Synthetic polynucleotide
aatgatacggcgaccaccgagatctacaccctatcctacactctttccctacacgacgctcttccgatctccaagtgttagaatgtttatcctttgttgc

SEQ ID NO: 3940 - DNA, 103 bp, Artificial Sequence
  Description of Artificial Sequence: Synthetic polynucleotide
aatgatacggcgaccaccgagatctacaccctatcctacactctttccctacacgacgctcttccgatctcttcacattctaaagtgttcaaattcctcctag

SEQ ID NO: 3941 - DNA, 99 bp, Artificial Sequence
  Description of Artificial Sequence: Synthetic primer
aatgatacggcgaccaccgagatctacaccctatcctacactctttccctacacgacgctcttccgatcttcacctctattcacagcttagcttatcct

SEQ ID NO: 3942 - DNA, 91 bp, Artificial Sequence
  Description of Artificial Sequence: Synthetic primer
aatgatacggcgaccaccgagatctacaccctatcctacactctttccctacacgacgctcttccgatcttcatcctgtctccaggccact

SEQ ID NO: 3943 - DNA, 99 bp, Artificial Sequence
  Description of Artificial Sequence: Synthetic primer
aatgatacggcgaccaccgagatctacaccctatcctacactctttccctacacgacgctcttccgatctgccagaaagtttattttctcttccattct

SEQ ID NO: 3944 - DNA, 99 bp, Artificial Sequence
  Description of Artificial Sequence: Synthetic primer
aatgatacggcgaccaccgagatctacaccctatcctacactctttccctacacgacgctcttccgatcttggctttgttcaaattaaaggttcttctt

SEQ ID NO: 3945 - DNA, 95 bp, Artificial Sequence
  Description of Artificial Sequence: Synthetic primer
aatgatacggcgaccaccgagatctacaccctatcctacactctttccctacacgacgctcttccgatctcagggtgaaactaatgcagcccttc

SEQ ID NO: 3946 - DNA, 95 bp, Artificial Sequence
  Description of Artificial Sequence: Synthetic primer
aatgatacggcgaccaccgagatctacaccctatcctacactctttccctacacgacgctcttccgatctagcagggaaaggagagttcctatgt

SEQ ID NO: 3947 - DNA, 96 bp, Artificial Sequence
  Description of Artificial Sequence: Synthetic primer
aatgatacggcgaccaccgagatctacaccctatcctacactctttccctacacgacgctcttccgatctggagttggcagatgctctaatgtact

SEQ ID NO: 3948 - DNA, 93 bp, Artificial Sequence
  Description of Artificial Sequence: Synthetic primer
aatgatacggcgaccaccgagatctacaccctatcctacactctttccctacacgacgctcttccgatctccagctcttttatgcctttggcc

SEQ ID NO: 3949 - DNA, 89 bp, Artificial Sequence
  Description of Artificial Sequence: Synthetic primer
aatgatacggcgaccaccgagatctacaccctatcctacactctttccctacacgacgctcttccgatctcgagcagcgaacagccacg

SEQ ID NO: 3950 - DNA, 95 bp, Artificial Sequence
  Description of Artificial Sequence: Synthetic primer
aatgatacggcgaccaccgagatctacaccctatcctacactctttccctacacgacgctcttccgatctggctcgggagaagaaaagccatttc

SEQ ID NO: 3951 - DNA, 91 bp, Artificial Sequence
  Description of Artificial Sequence: Synthetic primer
aatgatacggcgaccaccgagatctacaccctatcctacactctttccctacacgacgctcttccgatctaaggcaccctcagagctaccc

SEQ ID NO: 3952 - DNA, 94 bp, Artificial Sequence
  Description of Artificial Sequence: Synthetic primer
aatgatacggcgaccaccgagatctacaccctatcctacactctttccctacacgacgctcttccgatctatgagaaggtcatccctgttcgca

SEQ ID NO: 3953 - DNA, 91 bp, Artificial Sequence; identical to SEQ ID NO: 3951
  Description of Artificial Sequence: Synthetic primer

SEQ ID NO: 3954 - DNA, 94 bp, Artificial Sequence
  Description of Artificial Sequence: Synthetic primer
aatgatacggcgaccaccgagatctacaccctatcctacactctttccctacacgacgctcttccgatctcttctcacggctgtttcccttctc

SEQ ID NO: 3955 - DNA, 93 bp, Artificial Sequence
  Description of Artificial Sequence: Synthetic primer
aatgatacggcgaccaccgagatctacaccctatcctacactctttccctacacgacgctcttccgatctctctgcttgtgttctctgtctcc

SEQ ID NO: 3956 - DNA, 100 bp, Artificial Sequence
  Description of Artificial Sequence: Synthetic polynucleotide
aatgatacggcgaccaccgagatctacaccctatcctacactctttccctacacgacgctcttccgatctatgaagtgacagttccagtagtcctacttt

SEQ ID NO: 3957 - DNA, 96 bp, Artificial Sequence
  Description of Artificial Sequence: Synthetic primer
aatgatacggcgaccaccgagatctacaccctatcctacactctttccctacacgacgctcttccgatctgggcctgggttaagtatgcagattac

SEQ ID NO: 3958 - DNA, 95 bp, Artificial Sequence
  Description of Artificial Sequence: Synthetic primer
aatgatacggcgaccaccgagatctacaccctatcctacactctttccctacacgacgctcttccgatctcctgtccctctctcttcctctcttc

SEQ ID NO: 3959 - DNA, 96 bp, Artificial Sequence
  Description of Artificial Sequence: Synthetic primer
aatgatacggcgaccaccgagatctacaccctatcctacactctttccctacacgacgctcttccgatcttctcttatcctgatgggttgtgtttg

SEQ ID NO: 3960 - DNA, 96 bp, Artificial Sequence
  Description of Artificial Sequence: Synthetic primer
aatgatacggcgaccaccgagatctacaccctatcctacactctttccctacacgacgctcttccgatctagcacgttcttctgctgtatgtaacc

SEQ ID NO: 3961 - DNA, 102 bp, Artificial Sequence
  Description of Artificial Sequence: Synthetic polynucleotide
aatgatacggcgaccaccgagatctacaccctatcctacactctttccctacacgacgctcttccgatctgcacttcctgattttgttttcaacttctaatc

SEQ ID NO: 3962 - DNA, 99 bp, Artificial Sequence
  Description of Artificial Sequence: Synthetic primer
aatgatacggcgaccaccgagatctacaccctatcctacactctttccctacacgacgctcttccgatcttagtattctgagctgtgtgctagaggtaa

SEQ ID NO: 3963 - DNA, 99 bp, Artificial Sequence
  Description of Artificial Sequence: Synthetic primer
aatgatacggcgaccaccgagatctacaccctatcctacactctttccctacacgacgctcttccgatcttgatactgctgggtataatgcaatggaag

SEQ ID NO: 3964 - DNA, 102 bp, Artificial Sequence
  Description of Artificial Sequence: Synthetic polynucleotide
aatgatacggcgaccaccgagatctacaccctatcctacactctttccctacacgacgctcttccgatctccagaactttgtaattcaacattcatcgttgt

SEQ ID NO: 3965 - DNA, 95 bp, Artificial Sequence
  Description of Artificial Sequence: Synthetic primer
aatgatacggcgaccaccgagatctacaccctatcctacactctttccctacacgacgctcttccgatctaattggtggcgatggttttctcctt

SEQ ID NO: 3966 - DNA, 103 bp, Artificial Sequence
  Description of Artificial Sequence: Synthetic polynucleotide
aatgatacggcgaccaccgagatctacaccctatcctacactctttccctacacgacgctcttccgatcttgaattatcactatcagaacaaagcagtaaagt

SEQ ID NO: 3967 - DNA, 97 bp, Artificial Sequence
  Description of Artificial Sequence: Synthetic primer
aatgatacggcgaccaccgagatctacaccctatcctacactctttccctacacgacgctcttccgatctcgttcccttgatgtctacaatttcacc

SEQ ID NO: 3968 - DNA, 98 bp, Artificial Sequence
  Description of Artificial Sequence: Synthetic primer
aatgatacggcgaccaccgagatctacaccctatcctacactctttccctacacgacgctcttccgatctctcaaagtatttcattttcttggtgcca

SEQ ID NO: 3969 - DNA, 96 bp, Artificial Sequence
  Description of Artificial Sequence: Synthetic primer
aatgatacggcgaccaccgagatctacaccctatcctacactctttccctacacgacgctcttccgatctcacagcaagttgcagcgtttatagtc

SEQ ID NO: 3970 - DNA, 98 bp, Artificial Sequence
  Description of Artificial Sequence: Synthetic primer
aatgatacggcgaccaccgagatctacaccctatcctacactctttccctacacgacgctcttccgatcttttcttcacagtgcagtgaattggaaga

SEQ ID NO: 3971 - DNA, 105 bp, Artificial Sequence
  Description of Artificial Sequence: Synthetic polynucleotide
aatgatacggcgaccaccgagatctacaccctatcctacactctttccctacacgacgctcttccgatctatgaagaagtagttcagactgttaatacagatttc

SEQ ID NO: 3972 - DNA, 97 bp, Artificial Sequence
  Description of Artificial Sequence: Synthetic primer
aatgatacggcgaccaccgagatctacaccctatcctacactctttccctacacgacgctcttccgatctctttcctgtggttggtcagaaagataa

SEQ ID NO: 3973 - DNA, 97 bp, Artificial Sequence
  Description of Artificial Sequence: Synthetic primer
aatgatacggcgaccaccgagatctacaccctatcctacactctttccctacacgacgctcttccgatctagatctcatgttaagtggagaaagggt

SEQ ID NO: 3974 - DNA, 100 bp, Artificial Sequence
  Description of Artificial Sequence: Synthetic polynucleotide
aatgatacggcgaccaccgagatctacaccctatcctacactctttccctacacgacgctcttccgatctttctattcagaatgagaaaaatcctaaccc

SEQ ID NO: 3975 - DNA, 96 bp, Artificial Sequence
  Description of Artificial Sequence: Synthetic primer
aatgatacggcgaccaccgagatctacaccctatcctacactctttccctacacgacgctcttccgatctccagaagtgatgaactgttaggttct

SEQ ID NO: 3976 - DNA, 99 bp, Artificial Sequence
  Description of Artificial Sequence: Synthetic primer
aatgatacggcgaccaccgagatctacaccctatcctacactctttccctacacgacgctcttccgatcttgacaattcagtttttgagtaccttgtta

SEQ ID NO: 3977 - DNA, 102 bp, Artificial Sequence
  Description of Artificial Sequence: Synthetic polynucleotide
aatgatacggcgaccaccgagatctacaccctatcctacactctttccctacacgacgctcttccgatcttgtttcttattaggactctgtcttttccctat

SEQ ID NO: 3978 - DNA, 96 bp, Artificial Sequence
  Description of Artificial Sequence: Synthetic primer
aatgatacggcgaccaccgagatctacaccctatcctacactctttccctacacgacgctcttccgatctctgccacagtagatgctcagtaaata

SEQ ID NO: 3979 - DNA, 97 bp, Artificial Sequence
  Description of Artificial Sequence: Synthetic primer
aatgatacggcgaccaccgagatctacaccctatcctacactctttccctacacgacgctcttccgatcttgcttgactgttctttaccatactgtt

SEQ ID NO: 3980 - DNA, 101 bp, Artificial Sequence
  Description of Artificial Sequence: Synthetic polynucleotide
aatgatacggcgaccaccgagatctacaccctatcctacactctttccctacacgacgctcttccgatctttttctctaactgcaaacataatgttttccc

SEQ ID NO: 3981 - DNA, 98 bp, Artificial Sequence
  Description of Artificial Sequence: Synthetic primer
aatgatacggcgaccaccgagatctacaccctatcctacactctttccctacacgacgctcttccgatctcacttgctgagtgtgtttctcaaacaat

SEQ ID NO: 3982 - DNA, 103 bp, Artificial Sequence
  Description of Artificial Sequence: Synthetic polynucleotide
aatgatacggcgaccaccgagatctacaccctatcctacactctttccctacacgacgctcttccgatctccttttgagtattctttctacaaaaggaagtaa

SEQ ID NO: 3983 - DNA, 98 bp, Artificial Sequence
  Description of Artificial Sequence: Synthetic primer
aatgatacggcgaccaccgagatctacaccctatcctacactctttccctacacgacgctcttccgatcttgagcctcatttattttctttttctccc

SEQ ID NO: 3984 - DNA, 100 bp, Artificial Sequence
  Description of Artificial Sequence: Synthetic polynucleotide
aatgatacggcgaccaccgagatctacaccctatcctacactctttccctacacgacgctcttccgatcttctaatgtgttaaagttcattggaacagaa

SEQ ID NO: 3985 - DNA, 99 bp, Artificial Sequence
  Description of Artificial Sequence: Synthetic primer
aatgatacggcgaccaccgagatctacaccctatcctacactctttccctacacgacgctcttccgatctagcattttttagaaaacactttctcggtg

SEQ ID NO: 3986 - DNA, 100 bp, Artificial Sequence
  Description of Artificial Sequence: Synthetic polynucleotide
aatgatacggcgaccaccgagatctacaccctatcctacactctttccctacacgacgctcttccgatctggtttggttcgtaattgttgtttttatgtt

SEQ ID NO: 3987 - DNA, 101 bp, Artificial Sequence
  Description of Artificial Sequence: Synthetic polynucleotide
aatgatacggcgaccaccgagatctacaccctatcctacactctttccctacacgacgctcttccgatctcaggtttgcctaaattcctagtttgtagttc

SEQ ID NO: 3988 - DNA, 98 bp, Artificial Sequence
  Description of Artificial Sequence: Synthetic primer
aatgatacggcgaccaccgagatctacaccctatcctacactctttccctacacgacgctcttccgatctatcttctaccaggctcttagccaaaata

SEQ ID NO: 3989 - DNA, 102 bp, Artificial Sequence
  Description of Artificial Sequence: Synthetic polynucleotide
aatgatacggcgaccaccgagatctacaccctatcctacactctttccctacacgacgctcttccgatctgtttttaatcatacctgacttatctctttgtg

SEQ ID NO: 3990 - DNA, 103 bp, Artificial Sequence
  Description of Artificial Sequence: Synthetic polynucleotide
aatgatacggcgaccaccgagatctacaccctatcctacactctttccctacacgacgctcttccgatcttattagagatgacaattatcaacctcatctgct

SEQ ID NO: 3991 - DNA, 101 bp, Artificial Sequence
  Description of Artificial Sequence: Synthetic polynucleotide
aatgatacggcgaccaccgagatctacaccctatcctacactctttccctacacgacgctcttccgatctggcaaaggtataacgctattgtcaaattctc

SEQ ID NO: 3992 - DNA, 103 bp, Artificial Sequence; identical to SEQ ID NO: 3990
  Description of Artificial Sequence: Synthetic polynucleotide

SEQ ID NO: 3993 - DNA, 99 bp, Artificial Sequence
  Description of Artificial Sequence: Synthetic primer
aatgatacggcgaccaccgagatctacaccctatcctacactctttccctacacgacgctcttccgatcttaacaaggcattccaaaattgttagcaat

SEQ ID NO: 3994 - DNA, 98 bp, Artificial Sequence
  Description of Artificial Sequence: Synthetic primer
aatgatacggcgaccaccgagatctacaccctatcctacactctttccctacacgacgctcttccgatcttgtagttcaactaaacagaggacttacc

SEQ ID NO: 3995 - DNA, 102 bp, Artificial Sequence
  Description of Artificial Sequence: Synthetic polynucleotide
aatgatacggcgaccaccgagatctacaccctatcctacactctttccctacacgacgctcttccgatcttttcctagtcttgctagttcttactttttgta

SEQ ID NO: 3996 - DNA, 98 bp, Artificial Sequence
  Description of Artificial Sequence: Synthetic primer
aatgatacggcgaccaccgagatctacaccctatcctacactctttccctacacgacgctcttccgatctagaagccactggagaagttccagatatt

SEQ ID NO: 3997 - DNA, 100 bp, Artificial Sequence
  Description of Artificial Sequence: Synthetic polynucleotide
aatgatacggcgaccaccgagatctacaccctatcctacactctttccctacacgacgctcttccgatctcacagaaggaatcgtcatctataaaactat

SEQ ID NO: 3998 - DNA, 96 bp, Artificial Sequence
  Description of Artificial Sequence: Synthetic primer
aatgatacggcgaccaccgagatctacaccctatcctacactctttccctacacgacgctcttccgatctatcattttcacactgtccttcctgca

SEQ ID NO: 3999 - DNA, 98 bp, Artificial Sequence
  Description of Artificial Sequence: Synthetic primer
aatgatacggcgaccaccgagatctacaccctatcctacactctttccctacacgacgctcttccgatctcttgaaaatgggttcgtttacacaagtc

SEQ ID NO: 4000 - DNA, 103 bp, Artificial Sequence
  Description of Artificial Sequence: Synthetic polynucleotide
aatgatacggcgaccaccgagatctacaccctatcctacactctttccctacacgacgctcttccgatctaactgagtaaattcaaactgacttcctgattct

SEQ ID NO: 4001 - DNA, 96 bp, Artificial Sequence
  Description of Artificial Sequence: Synthetic primer
aatgatacggcgaccaccgagatctacaccctatcctacactctttccctacacgacgctcttccgatcttcttcaacaaaagtgccagtagtcat

SEQ ID NO: 4002 - DNA, 89 bp, Artificial Sequence
  Description of Artificial Sequence: Synthetic primer
aatgatacggcgaccaccgagatctacaccctatcctacactctttccctacacgacgctcttccgatctcgttcgggttgtccctgga

SEQ ID NO: 4003 - DNA, 98 bp, Artificial Sequence
  Description of Artificial Sequence: Synthetic primer
aatgatacggcgaccaccgagatctacaccctatcctacactctttccctacacgacgctcttccgatcttccttctctaagccatttttttgcttca

SEQ ID NO: 4004 - DNA, 96 bp, Artificial Sequence
  Description of Artificial Sequence: Synthetic primer
aatgatacggcgaccaccgagatctacaccctatcctacactctttccctacacgacgctcttccgatctgcctcgtaacaacctgccataatttt

SEQ ID NO: 4005 - DNA, 97 bp, Artificial Sequence
  Description of Artificial Sequence: Synthetic primer
aatgatacggcgaccaccgagatctacaccctatcctacactctttccctacacgacgctcttccgatctagacgtaggtgaatagtgaagactatg

SEQ ID NO: 4006 - DNA, 99 bp, Artificial Sequence
  Description of Artificial Sequence: Synthetic primer
aatgatacggcgaccaccgagatctacaccctatcctacactctttccctacacgacgctcttccgatctgattggcaacacgaaaggtaaaaatgaac

SEQ ID NO: 4007 - DNA, 103 bp, Artificial Sequence
  Description of Artificial Sequence: Synthetic polynucleotide
aatgatacggcgaccaccgagatctacaccctatcctacactctttccctacacgacgctcttccgatctctatagagggagaacagatataaataaaaagct

SEQ ID NO: 4008 - DNA, 103 bp, Artificial Sequence
  Description of Artificial Sequence: Synthetic polynucleotide
aatgatacggcgaccaccgagatctacaccctatcctacactctttccctacacgacgctcttccgatctcgagacttttctcatactgtattagaatttaga

SEQ ID NO: 4009 - DNA, 97 bp, Artificial Sequence
  Description of Artificial Sequence: Synthetic primer
aatgatacggcgaccaccgagatctacaccctatcctacactctttccctacacgacgctcttccgatctaatggatgtcctgaaactgctaaattg

SEQ ID NO: 4010 - DNA, 101 bp, Artificial Sequence
  Description of Artificial Sequence: Synthetic polynucleotide
aatgatacggcgaccaccgagatctacaccctatcctacactctttccctacacgacgctcttccgatctttaacaacggaaatatctaactgaaaggcaa

SEQ ID NO: 4011 - DNA, 102 bp, Artificial Sequence
  Description of Artificial Sequence: Synthetic polynucleotide
aatgatacggcgaccaccgagatctacaccctatcctacactctttccctacacgacgctcttccgatctaaaagccatcagtattgtagacaaacacatac

SEQ ID NO: 4012 - DNA, 103 bp, Artificial Sequence
  Description of Artificial Sequence: Synthetic polynucleotide
aatgatacggcgaccaccgagatctacaccctatcctacactctttccctacacgacgctcttccgatcttacagctacacaaaataaacacacacaaaaaag

SEQ ID NO: 4013 - DNA, 101 bp, Artificial Sequence
  Description of Artificial Sequence: Synthetic polynucleotide
aatgatacggcgaccaccgagatctacaccctatcctacactctttccctacacgacgctcttccgatctagagaagaaagagggatgagggaatacataa

SEQ ID NO: 4014 - DNA, 103 bp, Artificial Sequence
  Description of Artificial Sequence: Synthetic polynucleotide
aatgatacggcgaccaccgagatctacaccctatcctacactctttccctacacgacgctcttccgatctacacagagccctgaacaaataaaagtagaatat

SEQ ID NO: 4015 - DNA, 97 bp, Artificial Sequence
  Description of Artificial Sequence: Synthetic primer
aatgatacggcgaccaccgagatctacaccctatcctacactctttccctacacgacgctcttccgatctgaaaccttaaccatactgccgtatatg

SEQ ID NO: 4016 - DNA, 97 bp, Artificial Sequence
  Description of Artificial Sequence: Synthetic primer
aatgatacggcgaccaccgagatctacaccctatcctacactctttccctacacgacgctcttccgatctaaacacagagaacaagtgtttttgcag

SEQ ID NO: 4017 - DNA, 97 bp, Artificial Sequence
  Description of Artificial Sequence: Synthetic primer
aatgatacggcgaccaccgagatctacaccctatcctacactctttccctacacgacgctcttccgatctcaatgactgatttttaccaagagtgca

SEQ ID NO: 4018 - DNA, 96 bp, Artificial Sequence
  Description of Artificial Sequence: Synthetic primer
aatgatacggcgaccaccgagatctacaccctatcctacactctttccctacacgacgctcttccgatctagtactgttagcagaaatctggacaa

SEQ ID NO: 4019 - DNA, 97 bp, Artificial Sequence
  Description of Artificial Sequence: Synthetic primer
aatgatacggcgaccaccgagatctacaccctatcctacactctttccctacacgacgctcttccgatctcgaaactccatctcaaacaaacaaaca

SEQ ID NO: 4020 - DNA, 102 bp, Artificial Sequence
  Description of Artificial Sequence: Synthetic polynucleotide
aatgatacggcgaccaccgagatctacaccctatcctacactctttccctacacgacgctcttccgatctcaaagtctctaagactttgttctcatattaga

SEQ ID NO: 4021 - DNA, 99 bp, Artificial Sequence
  Description of Artificial Sequence: Synthetic primer
aatgatacggcgaccaccgagatctacaccctatcctacactctttccctacacgacgctcttccgatctcaagcctcattatatgtcctcttactctc

SEQ ID NO: 4022 - DNA, 99 bp, Artificial Sequence
  Description of Artificial Sequence: Synthetic primer
aatgatacggcgaccaccgagatctacaccctatcctacactctttccctacacgacgctcttccgatctgaatagcttacaatacgcaacttccacac

SEQ ID NO: 4023 - DNA, 101 bp, Artificial Sequence
  Description of Artificial Sequence: Synthetic polynucleotide
aatgatacggcgaccaccgagatctacaccctatcctacactctttccctacacgacgctcttccgatctctaactgtatgttagctctttcagatttact

SEQ ID NO: 4024 - DNA, 103 bp, Artificial Sequence
  Description of Artificial Sequence: Synthetic polynucleotide
aatgatacggcgaccaccgagatctacaccctatcctacactctttccctacacgacgctcttccgatctaactggtagctccaactaatcataagagatttt

SEQ ID NO: 4025 - DNA, 99 bp, Artificial Sequence
  Description of Artificial Sequence: Synthetic primer
aatgatacggcgaccaccgagatctacaccctatcctacactctttccctacacgacgctcttccgatctaatgtcctcattaaggtctatccaaaact

SEQ ID NO: 4026 - DNA, 99 bp, Artificial Sequence
  Description of Artificial Sequence: Synthetic primer
aatgatacggcgaccaccgagatctacaccctatcctacactctttccctacacgacgctcttccgatctcaaaatgtgtggtgatgctgaaaagtaac

SEQ ID NO: 4027 - DNA, 103 bp, Artificial Sequence
  Description of Artificial Sequence: Synthetic polynucleotide
aatgatacggcgaccaccgagatctacaccctatcctacactctttccctacacgacgctcttccgatctgtatacaacagaatatacgatggcctccatata

SEQ ID NO: 4028 - DNA, 94 bp, Artificial Sequence
  Description of Artificial Sequence: Synthetic primer
aatgatacggcgaccaccgagatctacaccctatcctacactctttccctacacgacgctcttccgatctttgaagtcatctgggctgagacag

SEQ ID NO: 4029 - DNA, 102 bp, Artificial Sequence
  Description of Artificial Sequence: Synthetic polynucleotide
aatgatacggcgaccaccgagatctacaccctatcctacactctttccctacacgacgctcttccgatctactggaaaggttaagcgtcaataatttattgt

SEQ ID NO: 4030 - DNA, 90 bp, Artificial Sequence
  Description of Artificial Sequence: Synthetic primer
aatgatacggcgaccaccgagatctacaccctatcctacactctttccctacacgacgctcttccgatctcccacacctgccatcatccc

SEQ ID NO: 4031 - DNA, 91 bp, Artificial Sequence
  Description of Artificial Sequence: Synthetic primer
aatgatacggcgaccaccgagatctacaccctatcctacactctttccctacacgacgctcttccgatctcctgagctggctgaccactat

SEQ ID NO: 4032 - DNA, 92 bp, Artificial Sequence
  Description of Artificial Sequence: Synthetic primer
aatgatacggcgaccaccgagatctacaccctatcctacactctttccctacacgacgctcttccgatctcacaacctatgagcgccacatg

SEQ ID NO: 4033 - DNA, 90 bp, Artificial Sequence
  Description of Artificial Sequence: Synthetic primer
aatgatacggcgaccaccgagatctacaccctatcctacactctttccctacacgacgctcttccgatcttcggagctgacccacatccc

SEQ ID NO: 4034 - DNA, 91 bp, Artificial Sequence
  Description of Artificial Sequence: Synthetic primer
aatgatacggcgaccaccgagatctacaccctatcctacactctttccctacacgacgctcttccgatcttctgtcacctgtgatggtggc

SEQ ID NO: 4035 - DNA, 92 bp, Artificial Sequence
  Description of Artificial Sequence: Synthetic primer
aatgatacggcgaccaccgagatctacaccctatcctacactctttccctacacgacgctcttccgatcttgtggatgtgggtggaaggagg

SEQ ID NO: 4036 - DNA, 94 bp, Artificial Sequence
  Description of Artificial Sequence: Synthetic primer
aatgatacggcgaccaccgagatctacaccctatcctacactctttccctacacgacgctcttccgatctactgatataagcaaggtccggtgg

SEQ ID NO: 4037 - DNA, 89 bp, Artificial Sequence
  Description of Artificial Sequence: Synthetic primer
aatgatacggcgaccaccgagatctacaccctatcctacactctttccctacacgacgctcttccgatctcccaagccactccactcca

SEQ ID NO: 4038 - DNA, 92 bp, Artificial Sequence
  Description of Artificial Sequence: Synthetic primer
aatgatacggcgaccaccgagatctacaccctatcctacactctttccctacacgacgctcttccgatctaagtcagggctgtcagggagag

SEQ ID NO: 4039 - DNA, 91 bp, Artificial Sequence
  Description of Artificial Sequence: Synthetic primer
aatgatacggcgaccaccgagatctacaccctatcctacactctttccctacacgacgctcttccgatctggtgttgagggtagggaagga

SEQ ID NO: 4040 - DNA, 89 bp, Artificial Sequence
  Description of Artificial Sequence: Synthetic primer
aatgatacggcgaccaccgagatctacaccctatcctacactctttccctacacgacgctcttccgatctcatcccaggccacacagcc

SEQ ID NO: 4041 - DNA, 97 bp, Artificial Sequence
  Description of Artificial Sequence: Synthetic primer
aatgatacggcgaccaccgagatctacaccctatcctacactctttccctacacgacgctcttccgatctccagattctctacagcctttagatcca

SEQ ID NO: 4042 - DNA, 91 bp, Artificial Sequence
  Description of Artificial Sequence: Synthetic primer
aatgatacggcgaccaccgagatctacaccctatcctacactctttccctacacgacgctcttccgatctactcaccctctcccagagtct

SEQ ID NO: 4043 - DNA, 90 bp, Artificial Sequence
  Description of Artificial Sequence: Synthetic primer
aatgatacggcgaccaccgagatctacaccctatcctacactctttccctacacgacgctcttccgatctgggcatagggaaggagctgg

SEQ ID NO: 4044 - DNA, 91 bp, Artificial Sequence
  Description of Artificial Sequence: Synthetic primer
aatgatacggcgaccaccgagatctacaccctatcctacactctttccctacacgacgctcttccgatctagggctcttccctctgctatg

SEQ ID NO: 4045 - DNA, 99 bp, Artificial Sequence
  Description of Artificial Sequence: Synthetic primer
aatgatacggcgaccaccgagatctacaccctatcctacactctttccctacacgacgctcttccgatctatatttgtagactgaatgattaaacgccc

SEQ ID NO: 4046 - DNA, 89 bp, Artificial Sequence
  Description of Artificial Sequence: Synthetic primer
aatgatacggcgaccaccgagatctacaccctatcctacactctttccctacacgacgctcttccgatcttcagggagtgcaggagcag

SEQ ID NO: 4047 - DNA, 90 bp, Artificial Sequence
  Description of Artificial Sequence: Synthetic primer
aatgatacggcgaccaccgagatctacaccctatcctacactctttccctacacgacgctcttccgatctatggtcaggccatgccctcc

SEQ ID NO: 4048 - DNA, 91 bp, Artificial Sequence
  Description of Artificial Sequence: Synthetic primer
aatgatacggcgaccaccgagatctacaccctatcctacactctttccctacacgacgctcttccgatctgggagacctaagggtcctcac

SEQ ID NO: 4049 - DNA, 94 bp, Artificial Sequence
  Description of Artificial Sequence: Synthetic primer
aatgatacggcgaccaccgagatctacaccctatcctacactctttccctacacgacgctcttccgatctaggccttcagtgtgttctccaaat

SEQ ID NO: 4050 - DNA, 91 bp, Artificial Sequence
  Description of Artificial Sequence: Synthetic primer
aatgatacggcgaccaccgagatctacaccctatcctacactctttccctacacgacgctcttccgatctgagtaccaggtggagggttgt

SEQ ID NO: 4051 - DNA, 103 bp, Artificial Sequence
  Description of Artificial Sequence: Synthetic polynucleotide
aatgatacggcgaccaccgagatctacaccctatcctacactctttccctacacgacgctcttccgatctctgctctctctctaatactctttctttttcttc

SEQ ID NO: 4052 - DNA, 88 bp, Artificial Sequence
  Description of Artificial Sequence: Synthetic primer
aatgatacggcgaccaccgagatctacaccctatcctacactctttccctacacgacgctcttccgatctgacgctttgccacggtgg

SEQ ID NO: 4053 - DNA, 92 bp, Artificial Sequence
  Description of Artificial Sequence: Synthetic primer
aatgatacggcgaccaccgagatctacaccctatcctacactctttccctacacgacgctcttccgatctcccgttgcttttcctctgggaa

SEQ ID NO: 4054 - DNA, 102 bp, Artificial Sequence
  Description of Artificial Sequence: Synthetic polynucleotide
aatgatacggcgaccaccgagatctacaccctatcctacactctttccctacacgacgctcttccgatctcacccagattttcattcttctttctgtttttt

SEQ ID NO: 4055 - DNA, 101 bp, Artificial Sequence
  Description of Artificial Sequence: Synthetic polynucleotide
aatgatacggcgaccaccgagatctacaccctatcctacactctttccctacacgacgctcttccgatctgttgaattatttcccttttttttctctctcc

SEQ ID NO: 4056 - DNA, 104 bp, Artificial Sequence
  Description of Artificial Sequence: Synthetic polynucleotide
aatgatacggcgaccaccgagatctacaccctatcctacactctttccctacacgacgctcttccgatctgctctaggaattatagtaggttgtttttcagtct

SEQ ID NO: 4057 - DNA, 100 bp, Artificial Sequence
  Description of Artificial Sequence: Synthetic polynucleotide
aatgatacggcgaccaccgagatctacaccctatcctacactctttccctacacgacgctcttccgatcttctactgttttcctttacttactacacctc

SEQ ID NO: 4058 - DNA, 101 bp, Artificial Sequence
  Description of Artificial Sequence: Synthetic polynucleotide
aatgatacggcgaccaccgagatctacaccctatcctacactctttccctacacgacgctcttccgatctcctttagccctactcaggttaaaatgatgtt

SEQ ID NO: 4059 - DNA, 100 bp, Artificial Sequence
  Description of Artificial Sequence: Synthetic polynucleotide
aatgatacggcgaccaccgagatctacaccctatcctacactctttccctacacgacgctcttccgatcttcttttgtaagaattgctaaagtttgtcga

SEQ ID NO: 4060 - DNA, 100 bp, Artificial Sequence
  Description of Artificial Sequence: Synthetic polynucleotide
aatgatacggcgaccaccgagatctacaccctatcctacactctttccctacacgacgctcttccgatctgtgaaaacacccaagaatgttttatacttt

SEQ ID NO: 4061 - DNA, 102 bp, Artificial Sequence
  Description of Artificial Sequence: Synthetic polynucleotide
aatgatacggcgaccaccgagatctacaccctatcctacactctttccctacacgacgctcttccgatctagggtgaaacataaggttttctttttctgttt

SEQ ID NO: 4062 - DNA, 99 bp, Artificial Sequence
  Description of Artificial Sequence: Synthetic primer
aatgatacggcgaccaccgagatctacaccctatcctacactctttccctacacgacgctcttccgatctccctgataaattaacatacttgctcctcc

SEQ ID NO: 4063 - DNA, 105 bp, Artificial Sequence
  Description of Artificial Sequence: Synthetic polynucleotide
aatgatacggcgaccaccgagatctacaccctatcctacactctttccctacacgacgctcttccgatctctctctgattatatgcttgcttggaataaatatac

SEQ ID NO: 4064 - DNA, 104 bp, Artificial Sequence
  Description of Artificial Sequence: Synthetic polynucleotide
aatgatacggcgaccaccgagatctacaccctatcctacactctttccctacacgacgctcttccgatctgttactctgaatcttatcttccaatgacttcatt

SEQ ID NO: 4065 - DNA, 98 bp, Artificial Sequence
  Description of Artificial Sequence: Synthetic primer
aatgatacggcgaccaccgagatctacaccctatcctacactctttccctacacgacgctcttccgatctaagttaggtttgttttgttttgcctcac

SEQ ID NO: 4066 - DNA, 99 bp, Artificial Sequence
  Description of Artificial Sequence: Synthetic primer
aatgatacggcgaccaccgagatctacaccctatcctacactctttccctacacgacgctcttccgatcttttcttgtgagtttttgaaatctctgtga

SEQ ID NO: 4067 - DNA, 97 bp, Artificial Sequence
  Description of Artificial Sequence: Synthetic primer
aatgatacggcgaccaccgagatctacaccctatcctacactctttccctacacgacgctcttccgatctaagaaaggcttgtgtctacatttttca

SEQ ID NO: 4068 - DNA, 102 bp, Artificial Sequence
  Description of Artificial Sequence: Synthetic polynucleotide
aatgatacggcgaccaccgagatctacaccctatcctacactctttccctacacgacgctcttccgatctaatgtaatttgctccctttacctcttatcaat

SEQ ID NO: 4069 - DNA, 90 bp, Artificial Sequence
  Description of Artificial Sequence: Synthetic primer
aatgatacggcgaccaccgagatctacaccctatcctacactctttccctacacgacgctcttccgatctcagatgtggcacggagcaac

SEQ ID NO: 4070 - DNA, 101 bp, Artificial Sequence
  Description of Artificial Sequence: Synthetic polynucleotide
aatgatacggcgaccaccgagatctacaccctatcctacactctttccctacacgacgctcttccgatcttattctcttttgttaatgtcaggacaaagtc

SEQ ID NO: 4071 - DNA, 102 bp, Artificial Sequence
  Description of Artificial Sequence: Synthetic polynucleotide
aatgatacggcgaccaccgagatctacaccctatcctacactctttccctacacgacgctcttccgatctcagttactgtgatgtagttgtctatgttaaaa

SEQ ID NO: 4072 - DNA, 90 bp, Artificial Sequence
  Description of Artificial Sequence: Synthetic primer
aatgatacggcgaccaccgagatctacaccctatcctacactctttccctacacgacgctcttccgatctccagctctccgcctcccttc

SEQ ID NO: 4073 - DNA, 89 bp, Artificial Sequence
  Description of Artificial Sequence: Synthetic primer
aatgatacggcgaccaccgagatctacaccctatcctacactctttccctacacgacgctcttccgatctatgcgtccctcgcaagtca

SEQ ID NO: 4074 - DNA, 89 bp, Artificial Sequence
  Description of Artificial Sequence: Synthetic primer
aatgatacggcgaccaccgagatctacaccctatcctacactctttccctacacgacgctcttccgatcttactccgcccagggacacc

SEQ ID NO: 4075 - DNA, 94 bp, Artificial Sequence
  Description of Artificial Sequence: Synthetic primer
aatgatacggcgaccaccgagatctacaccctatcctacactctttccctacacgacgctcttccgatctcgcactaaaacaacagcgaacttc

SEQ ID NO: 4076 - DNA, 101 bp, Artificial Sequence
  Description of Artificial Sequence: Synthetic polynucleotide
aatgatacggcgaccaccgagatctacaccctatcctacactctttccctacacgacgctcttccgatctaggtttttaggaaatgggcctttttcatttt

SEQ ID NO: 4077 - DNA, 95 bp, Artificial Sequence
  Description of Artificial Sequence: Synthetic primer
aatgatacggcgaccaccgagatctacaccctatcctacactctttccctacacgacgctcttccgatctaaaaaatcctgggtggatgttaccc

SEQ ID NO: 4078 - DNA, 105 bp, Artificial Sequence
  Description of Artificial Sequence: Synthetic polynucleotide
aatgatacggcgaccaccgagatctacaccctatcctacactctttccctacacgacgctcttccgatcttaagagtctttctgagtattcagattctcattagt

SEQ ID NO: 4079 - DNA, 90 bp, Artificial Sequence
  Description of Artificial Sequence: Synthetic primer
aatgatacggcgaccaccgagatctacaccctatcctacactctttccctacacgacgctcttccgatctccctgacctctcggtccagc

SEQ ID NO: 4080 - DNA, 100 bp, Artificial Sequence
  Description of Artificial Sequence: Synthetic polynucleotide
aatgatacggcgaccaccgagatctacaccctatcctacactctttccctacacgacgctcttccgatctcctttctttggaaaccctctaaggagttat

SEQ ID NO: 4081 - DNA, 92 bp, Artificial Sequence
  Description of Artificial Sequence: Synthetic primer
aatgatacggcgaccaccgagatctacaccctatcctacactctttccctacacgacgctcttccgatctgtgaggatgccagtttctgcat

SEQ ID NO: 4082 - DNA, 97 bp, Artificial Sequence
  Description of Artificial Sequence: Synthetic primer
aatgatacggcgaccaccgagatctacaccctatcctacactctttccctacacgacgctcttccgatctataaccagttgctgcaagtcagttgaa

SEQ ID NO: 4083 - DNA, 90 bp, Artificial Sequence
  Description of Artificial Sequence: Synthetic primer
aatgatacggcgaccaccgagatctacaccctatcctacactctttccctacacgacgctcttccgatctaggtcgaggcagcaaaggct

SEQ ID NO: 4084 - DNA, 99 bp, Artificial Sequence
  Description of Artificial Sequence: Synthetic primer
aatgatacggcgaccaccgagatctacaccctatcctacactctttccctacacgacgctcttccgatctagcaaagttgccaaaataaaactcaggta

SEQ ID NO: 4085 - DNA, 99 bp, Artificial Sequence
  Description of Artificial Sequence: Synthetic primer
aatgatacggcgaccaccgagatctacaccctatcctacactctttccctacacgacgctcttccgatctacctcctccatttttttaagtcaaaggct

SEQ ID NO: 4086 - DNA, 99 bp, Artificial Sequence
  Description of Artificial Sequence: Synthetic primer
aatgatacggcgaccaccgagatctacaccctatcctacactctttccctacacgacgctcttccgatctttgcttcttccgaataaagagatcaccac

SEQ ID NO: 4087 - DNA, 95 bp, Artificial Sequence
  Description of Artificial Sequence: Synthetic primer
aatgatacggcgaccaccgagatctacaccctatcctacactctttccctacacgacgctcttccgatctcctgagcttagagatgagccatgct

SEQ ID NO: 4088 - DNA, 93 bp, Artificial Sequence
  Description of Artificial Sequence: Synthetic primer
aatgatacggcgaccaccgagatctacaccctatcctacactctttccctacacgacgctcttccgatctgcatttcccagcacatgggtctg

SEQ ID NO: 4089 - DNA, 101 bp, Artificial Sequence
  Description of Artificial Sequence: Synthetic polynucleotide
aatgatacggcgaccaccgagatctacaccctatcctacactctttccctacacgacgctcttccgatctgatatcatcatactccaccaaaggtttgata

SEQ ID NO: 4090 - DNA, 101 bp, Artificial Sequence
  Description of Artificial Sequence: Synthetic polynucleotide
aatgatacggcgaccaccgagatctacaccctatcctacactctttccctacacgacgctcttccgatctgttttgtaacttttgggtgtttccctttttc

SEQ ID NO: 4091 - DNA, 91 bp, Artificial Sequence
  Description of Artificial Sequence: Synthetic primer
aatgatacggcgaccaccgagatctacaccctatcctacactctttccctacacgacgctcttccgatctcaattcctcgcaacccaccct

SEQ ID NO: 4092 - DNA, 95 bp, Artificial Sequence
  Description of Artificial Sequence: Synthetic primer
aatgatacggcgaccaccgagatctacaccctatcctacactctttccctacacgacgctcttccgatctagttcagctcccagactggaattaa

SEQ ID NO: 4093 - DNA, 99 bp, Artificial Sequence
  Description of Artificial Sequence: Synthetic primer
aatgatacggcgaccaccgagatctacaccctatcctacactctttccctacacgacgctcttccgatctttttctgatgtttctgtctcctttggagt

SEQ ID NO: 4094 - DNA, 99 bp, Artificial Sequence
  Description of Artificial Sequence: Synthetic primer
aatgatacggcgaccaccgagatctacaccctatcctacactctttccctacacgacgctcttccgatctcagaaaatgctttatgtttagatcaaggg

SEQ ID NO: 4095 - DNA, 98 bp, Artificial Sequence
  Description of Artificial Sequence: Synthetic primer
aatgatacggcgaccaccgagatctacaccctatcctacactctttccctacacgacgctcttccgatctgagatttagttcaaaaggaagggagaaa

SEQ ID NO: 4096 - DNA, 102 bp, Artificial Sequence
  Description of Artificial Sequence: Synthetic polynucleotide
aatgatacggcgaccaccgagatctacaccctatcctacactctttccctacacgacgctcttccgatctacctcagaatttacttttgctaaatccactta

SEQ ID NO: 4097 - DNA, 93 bp, Artificial Sequence
  Description of Artificial Sequence: Synthetic primer
aatgatacggcgaccaccgagatctacaccctatcctacactctttccctacacgacgctcttccgatctagaaaggcaaagattggaccagt

SEQ ID NO: 4098 - DNA, 101 bp, Artificial Sequence
  Description of Artificial Sequence: Synthetic polynucleotide
aatgatacggcgaccaccgagatctacaccctatcctacactctttccctacacgacgctcttccgatctggagaagaggaaagtgcttaatcttatttgg

SEQ ID NO: 4099 - DNA, 99 bp, Artificial Sequence
  Description of Artificial Sequence: Synthetic primer
aatgatacggcgaccaccgagatctacaccctatcctacactctttccctacacgacgctcttccgatctcctgcctcaaaaaaacaaaacaaaacaaa

SEQ ID NO: 4100 - DNA, 99 bp, Artificial Sequence
  Description of Artificial Sequence: Synthetic primer
aatgatacggcgaccaccgagatctacaccctatcctacactctttccctacacgacgctcttccgatctacaaagtacaagtcaacagtatgtaagtt

SEQ ID NO: 4101 - DNA, 96 bp, Artificial Sequence
  Description of Artificial Sequence: Synthetic primer
aatgatacggcgaccaccgagatctacaccctatcctacactctttccctacacgacgctcttccgatctgagaatacctatcacacctgggcact

SEQ ID NO: 4102 - DNA, 96 bp, Artificial Sequence
  Description of Artificial Sequence: Synthetic primer
aatgatacggcgaccaccgagatctacaccctatcctacactctttccctacacgacgctcttccgatctcagccagacacagaaacgagatgttc

SEQ ID NO: 4103 - DNA, 95 bp, Artificial Sequence
  Description of Artificial Sequence: Synthetic primer
aatgatacggcgaccaccgagatctacaccctatcctacactctttccctacacgacgctcttccgatcttaaggcccagggaaagatttagggt

SEQ ID NO: 4104 - DNA, 94 bp, Artificial Sequence
  Description of Artificial Sequence: Synthetic primer
aatgatacggcgaccaccgagatctacaccctatcctacactctttccctacacgacgctcttccgatcttacgcttagcaaaagcacaaaggc

SEQ ID NO: 4105 - DNA, 91 bp, Artificial Sequence
  Description of Artificial Sequence: Synthetic primer
aatgatacggcgaccaccgagatctacaccctatcctacactctttccctacacgacgctcttccgatcttgctgctgcatctctgggttg

SEQ ID NO: 4106 - DNA, 100 bp, Artificial Sequence
  Description of Artificial Sequence: Synthetic polynucleotide
aatgatacggcgaccaccgagatctacaccctatcctacactctttccctacacgacgctcttccgatctatttttaagagggtatcaacagcacctgag

SEQ ID NO: 4107 - DNA, 91 bp, Artificial Sequence
  Description of Artificial Sequence: Synthetic primer
aatgatacggcgaccaccgagatctacaccctatcctacactctttccctacacgacgctcttccgatctcaggaggctctgcttcaggct

SEQ ID NO: 4108 - DNA, 100 bp, Artificial Sequence
  Description of Artificial Sequence: Synthetic polynucleotide
aatgatacggcgaccaccgagatctacaccctatcctacactctttccctacacgacgctcttccgatctgaaaggaatctttcaggacactgaagtctc

SEQ ID NO: 4109 - DNA, 92 bp, Artificial Sequence
  Description of Artificial Sequence: Synthetic primer
aatgatacggcgaccaccgagatctacaccctatcctacactctttccctacacgacgctcttccgatctggtctgggcaacaagttgcagg

SEQ ID NO: 4110 - DNA, 92 bp, Artificial Sequence
  Description of Artificial Sequence: Synthetic primer
aatgatacggcgaccaccgagatctacaccctatcctacactctttccctacacgacgctcttccgatctctcctcctcgcacttctgttcc

SEQ ID NO: 4111 - DNA, 89 bp, Artificial Sequence
  Description of Artificial Sequence: Synthetic primer
aatgatacggcgaccaccgagatctacaccctatcctacactctttccctacacgacgctcttccgatctatatgtcagaggcgggccg

SEQ ID NO: 4112 - DNA, 91 bp, Artificial Sequence
  Description of Artificial Sequence: Synthetic primer
aatgatacggcgaccaccgagatctacaccctatcctacactctttccctacacgacgctcttccgatctgccagggtcacctaaggagcc

SEQ ID NO: 4113 - DNA, 90 bp, Artificial Sequence
  Description of Artificial Sequence: Synthetic primer
aatgatacggcgaccaccgagatctacaccctatcctacactctttccctacacgacgctcttccgatctgcaaggctgcctgggacatc

SEQ ID NO: 4114 - DNA, 91 bp, Artificial Sequence
  Description of Artificial Sequence: Synthetic primer
aatgatacggcgaccaccgagatctacaccctatcctacactctttccctacacgacgctcttccgatctcttcgatctgctcctggcagg

SEQ ID NO: 4115 - DNA, 91 bp, Artificial Sequence
  Description of Artificial Sequence: Synthetic primer
aatgatacggcgaccaccgagatctacaccctatcctacactctttccctacacgacgctcttccgatctcggagaggagggactgtcagg

SEQ ID NO: 4116 - DNA, 89 bp, Artificial Sequence
  Description of Artificial Sequence: Synthetic primer
aatgatacggcgaccaccgagatctacaccctatcctacactctttccctacacgacgctcttccgatctcccgggtacagaggccact

SEQ ID NO: 4117 - DNA, 96 bp, Artificial Sequence
  Description of Artificial Sequence: Synthetic primer
aatgatacggcgaccaccgagatctacaccctatcctacactctttccctacacgacgctcttccgatcttggatcacctctcagacgcatactta

SEQ ID NO: 4118 - DNA, 96 bp, Artificial Sequence
  Description of Artificial Sequence: Synthetic primer
aatgatacggcgaccaccgagatctacaccctatcctacactctttccctacacgacgctcttccgatctcatgatgagaggagctgatgagaagc

SEQ ID NO: 4119 - DNA, 100 bp, Artificial Sequence
  Description of Artificial Sequence: Synthetic polynucleotide
aatgatacggcgaccaccgagatctacaccctatcctacactctttccctacacgacgctcttccgatctaagctcagagaaaaaagacataaagggact

SEQ ID NO: 4120 - DNA, 90 bp, Artificial Sequence
  Description of Artificial Sequence: Synthetic primer
aatgatacggcgaccaccgagatctacaccctatcctacactctttccctacacgacgctcttccgatctgggtggaacttgggcaagcc

SEQ ID NO: 4121 - DNA, 93 bp, Artificial Sequence
  Description of Artificial Sequence: Synthetic primer
aatgatacggcgaccaccgagatctacaccctatcctacactctttccctacacgacgctcttccgatctacaagctccgtccatcttcatcc

SEQ ID NO: 4122 - DNA, 92 bp, Artificial Sequence
  Description of Artificial Sequence: Synthetic primer
aatgatacggcgaccaccgagatctacaccctatcctacactctttccctacacgacgctcttccgatctcaagcccacactggaggagagg

SEQ ID NO: 4123 - DNA, 97 bp, Artificial Sequence
  Description of Artificial Sequence: Synthetic primer
aatgatacggcgaccaccgagatctacaccctatcctacactctttccctacacgacgctcttccgatctaagtctgttttcttcatggttttctga

SEQ ID NO: 4124 - DNA, 90 bp, Artificial Sequence
  Description of Artificial Sequence: Synthetic primer
aatgatacggcgaccaccgagatctacaccctatcctacactctttccctacacgacgctcttccgatctcagaggatgactggcctcga

SEQ ID NO: 4125 - DNA, 102 bp, Artificial Sequence
  Description of Artificial Sequence: Synthetic polynucleotide
aatgatacggcgaccaccgagatctacaccctatcctacactctttccctacacgacgctcttccgatctctttgaaaatgactgctaccttatatcccttc

SEQ ID NO: 4126 - DNA, 99 bp, Artificial Sequence
  Description of Artificial Sequence: Synthetic primer
aatgatacggcgaccaccgagatctacaccctatcctacactctttccctacacgacgctcttccgatctcatgtgttcagtcaagcaagttgtgtttc

SEQ ID NO: 4127 - DNA, 96 bp, Artificial Sequence
  Description of Artificial Sequence: Synthetic primer
aatgatacggcgaccaccgagatctacaccctatcctacactctttccctacacgacgctcttccgatctatttcaggtatggtgcctagtttcca

SEQ ID NO: 4128 - DNA, 99 bp, Artificial Sequence; identical to SEQ ID NO: 4126
  Description of Artificial Sequence: Synthetic primer

SEQ ID NO: 4129 - DNA, 95 bp, Artificial Sequence
  Description of Artificial Sequence: Synthetic primer
aatgatacggcgaccaccgagatctacaccctatcctacactctttccctacacgacgctcttccgatcttgagcatgtagaccaggacctaagg

SEQ ID NO: 4130 - DNA, 97 bp, Artificial Sequence
  Description of Artificial Sequence: Synthetic primer
aatgatacggcgaccaccgagatctacaccctatcctacactctttccctacacgacgctcttccgatcttgattgtagggtctcccttgatctgag

SEQ ID NO: 4131 - DNA, 97 bp, Artificial Sequence
  Description of Artificial Sequence: Synthetic primer
aatgatacggcgaccaccgagatctacaccctatcctacactctttccctacacgacgctcttccgatctgtagaaccttctgggatttcaggtatg

SEQ ID NO: 4132 - DNA, 97 bp, Artificial Sequence; identical to SEQ ID NO: 4130
  Description of Artificial Sequence: Synthetic primer

SEQ ID NO: 4133 - DNA, 90 bp, Artificial Sequence
  Description of Artificial Sequence: Synthetic primer
aatgatacggcgaccaccgagatctacaccctatcctacactctttccctacacgacgctcttccgatctaacctgccacctcctttccc

SEQ ID NO: 4134 - DNA, 92 bp, Artificial Sequence
  Description of Artificial Sequence: Synthetic primer
aatgatacggcgaccaccgagatctacaccctatcctacactctttccctacacgacgctcttccgatctgtggccctttcccaagtgatcc

SEQ ID NO: 4135 - DNA, 90 bp, Artificial Sequence
  Description of Artificial Sequence: Synthetic primer
aatgatacggcgaccaccgagatctacaccctatcctacactctttccctacacgacgctcttccgatctcctccctgcctctccacagc

SEQ ID NO: 4136 - DNA, 92 bp, Artificial Sequence; identical to SEQ ID NO: 4134
  Description of Artificial Sequence: Synthetic primer

SEQ ID NO: 4137 - DNA, 94 bp, Artificial Sequence
  Description of Artificial Sequence: Synthetic primer
aatgatacggcgaccaccgagatctacaccctatcctacactctttccctacacgacgctcttccgatctgcaccttctttcccatttgagttg

SEQ ID NO: 4138 - DNA, 92 bp, Artificial Sequence
  Description of Artificial Sequence: Synthetic primer
aatgatacggcgaccaccgagatctacaccctatcctacactctttccctacacgacgctcttccgatcttggtgctgtcccaaggcttttt

SEQ ID NO: 4139 - DNA, 96 bp, Artificial Sequence
  Description of Artificial Sequence: Synthetic primer
aatgatacggcgaccaccgagatctacaccctatcctacactctttccctacacgacgctcttccgatctttattttcctctcctctctgagcctc

SEQ ID NO: 4140 - DNA, 93 bp, Artificial Sequence
  Description of Artificial Sequence: Synthetic primer
aatgatacggcgaccaccgagatctacaccctatcctacactctttccctacacgacgctcttccgatcttctgactcccttctccctctctc

SEQ ID NO: 4141 - DNA, 94 bp, Artificial Sequence
  Description of Artificial Sequence: Synthetic primer
aatgatacggcgaccaccgagatctacaccctatcctacactctttccctacacgacgctcttccgatctctgaaattggctgattttggcctg

SEQ ID NO: 4142 - DNA, 93 bp, Artificial Sequence; identical to SEQ ID NO: 4140
  Description of Artificial Sequence: Synthetic primer

SEQ ID NO: 4143 - DNA, 89 bp, Artificial Sequence
  Description of Artificial Sequence: Synthetic primer
aatgatacggcgaccaccgagatctacaccctatcctacactctttccctacacgacgctcttccgatctcgtcctgcacagcgacaag

SEQ ID NO: 4144 - DNA, 90 bp, Artificial Sequence
  Description of Artificial Sequence: Synthetic primer
aatgatacggcgaccaccgagatctacaccctatcctacactctttccctacacgacgctcttccgatctgtgccgcatcctcaccctga

SEQ ID NO: 4145 - DNA, 92 bp, Artificial Sequence
  Description of Artificial Sequence: Synthetic primer
aatgatacggcgaccaccgagatctacaccctatcctacactctttccctacacgacgctcttccgatctcagagtcttaaaaccgagggcc

SEQ ID NO: 4146 - DNA, 103 bp, Artificial Sequence
  Description of Artificial Sequence: Synthetic polynucleotide
aatgatacggcgaccaccgagatctacaccctatcctacactctttccctacacgacgctcttccgatctagggataactctgtaagtacattatttacattg

SEQ ID NO: 4147 - DNA, 100 bp, Artificial Sequence
  Description of Artificial Sequence: Synthetic polynucleotide
aatgatacggcgaccaccgagatctacaccctatcctacactctttccctacacgacgctcttccgatctctaatgcttatgtccatgtgtggttctttt

SEQ ID NO: 4148 - DNA, 101 bp, Artificial Sequence
  Description of Artificial Sequence: Synthetic polynucleotide
aatgatacggcgaccaccgagatctacaccctatcctacactctttccctacacgacgctcttccgatctggcaaatatgattgaaatgtaatctgagaac

SEQ ID NO: 4149 - DNA, 94 bp, Artificial Sequence
  Description of Artificial Sequence: Synthetic primer
aatgatacggcgaccaccgagatctacaccctatcctacactctttccctacacgacgctcttccgatctgccaacagccaccttctcagtaac

SEQ ID NO: 4150 - DNA, 96 bp, Artificial Sequence
  Description of Artificial Sequence: Synthetic primer
aatgatacggcgaccaccgagatctacaccctatcctacactctttccctacacgacgctcttccgatctgctcaacttccgttttgagtgtttac

SEQ ID NO: 4151 - DNA, 98 bp, Artificial Sequence
  Description of Artificial Sequence: Synthetic primer
aatgatacggcgaccaccgagatctacaccctatcctacactctttccctacacgacgctcttccgatctatacaggttacttctttgcttattgcca

SEQ ID NO: 4152 - DNA, 91 bp, Artificial Sequence
  Description of Artificial Sequence: Synthetic primer
aatgatacggcgaccaccgagatctacaccctatcctacactctttccctacacgacgctcttccgatctacctggagaccttcgagcacc

SEQ ID NO: 4153 - DNA, 90 bp, Artificial Sequence
  Description of Artificial Sequence: Synthetic primer
aatgatacggcgaccaccgagatctacaccctatcctacactctttccctacacgacgctcttccgatctccagctagttgagcgcaccc

SEQ ID NO: 4154 - DNA, 89 bp, Artificial Sequence
  Description of Artificial Sequence: Synthetic primer
aatgatacggcgaccaccgagatctacaccctatcctacactctttccctacacgacgctcttccgatctggacaccggcccagacaca

SEQ ID NO: 4155 - DNA, 101 bp, Artificial Sequence
  Description of Artificial Sequence: Synthetic polynucleotide
aatgatacggcgaccaccgagatctacaccctatcctacactctttccctacacgacgctcttccgatctgtactcataagtcagttgataataacgatga

SEQ ID NO: 4156 - DNA, 102 bp, Artificial Sequence
  Description of Artificial Sequence: Synthetic polynucleotide
aatgatacggcgaccaccgagatctacaccctatcctacactctttccctacacgacgctcttccgatctttagttactcttaacaatccctgactgtttgc

SEQ ID NO: 4157 - DNA, 103 bp, Artificial Sequence
  Description of Artificial Sequence: Synthetic polynucleotide
aatgatacggcgaccaccgagatctacaccctatcctacactctttccctacacgacgctcttccgatcttacagacgactagaaaagtatccaactgtaatg

SEQ ID NO: 4158 - DNA, 102 bp, Artificial Sequence
  Description of Artificial Sequence: Synthetic polynucleotide
aatgatacggcgaccaccgagatctacaccctatcctacactctttccctacacgacgctcttccgatctgctacactgtgacttagcaaagatataacata

SEQ ID NO: 4159 - DNA, 97 bp, Artificial Sequence
  Description of Artificial Sequence: Synthetic primer
aatgatacggcgaccaccgagatctacaccctatcctacactctttccctacacgacgctcttccgatctattaaataatcgggcaaagcccatgtc

SEQ ID NO: 4160 - DNA, 98 bp, Artificial Sequence
  Description of Artificial Sequence: Synthetic primer
aatgatacggcgaccaccgagatctacaccctatcctacactctttccctacacgacgctcttccgatctccatcacactcagtctgctcttactttt

SEQ ID NO: 4161 - DNA, 97 bp, Artificial Sequence
  Description of Artificial Sequence: Synthetic primer
aatgatacggcgaccaccgagatctacaccctatcctacactctttccctacacgacgctcttccgatctcgaagacatctaagttcaaacaacagt

SEQ ID NO: 4162 - DNA, 102 bp, Artificial Sequence
  Description of Artificial Sequence: Synthetic polynucleotide
aatgatacggcgaccaccgagatctacaccctatcctacactctttccctacacgacgctcttccgatcttacactgagtattctggtaaagcaaaaatcaa

SEQ ID NO: 4163 - DNA, 101 bp, Artificial Sequence
  Description of Artificial Sequence: Synthetic polynucleotide
aatgatacggcgaccaccgagatctacaccctatcctacactctttccctacacgacgctcttccgatctcagttgggctagtcaattaaggaaaaaatgc

SEQ ID NO: 4164 - DNA, 98 bp, Artificial Sequence
  Description of Artificial Sequence: Synthetic primer
aatgatacggcgaccaccgagatctacaccctatcctacactctttccctacacgacgctcttccgatctcatactccaaaacttccatcatgctgat

SEQ ID NO: 4165 - DNA, 95 bp, Artificial Sequence
  Description of Artificial Sequence: Synthetic primer
aatgatacggcgaccaccgagatctacaccctatcctacactctttccctacacgacgctcttccgatcttttgtcatcaggttcttcttccgtt

SEQ ID NO: 4166 - DNA, 98 bp, Artificial Sequence
  Description of Artificial Sequence: Synthetic primer
aatgatacggcgaccaccgagatctacaccctatcctacactctttccctacacgacgctcttccgatctacactgacatgcagtcaatacaaaataa

SEQ ID NO: 4167 - DNA, 91 bp, Artificial Sequence
  Description of Artificial Sequence: Synthetic primer
aatgatacggcgaccaccgagatctacaccctatcctacactctttccctacacgacgctcttccgatctgcagcattcgcaacagtgcat

SEQ ID NO: 4168 - DNA, 92 bp, Artificial Sequence
  Description of Artificial Sequence: Synthetic primer
aatgatacggcgaccaccgagatctacaccctatcctacactctttccctacacgacgctcttccgatctcgagtcgtactgctttgccatg

SEQ ID NO: 4169 - DNA, 96 bp, Artificial Sequence
  Description of Artificial Sequence: Synthetic primer
aatgatacggcgaccaccgagatctacaccctatcctacactctttccctacacgacgctcttccgatctggacagacgacttctctaccaactcg

SEQ ID NO: 4170 - DNA, 89 bp, Artificial Sequence
  Description of Artificial Sequence: Synthetic primer
aatgatacggcgaccaccgagatctacaccctatcctacactctttccctacacgacgctcttccgatctgcacgcccgatccgtactc

SEQ ID NO: 4171 - DNA, 103 bp, Artificial Sequence
  Description of Artificial Sequence: Synthetic polynucleotide
aatgatacggcgaccaccgagatctacaccctatcctacactctttccctacacgacgctcttccgatctagtgtcatcttctcgtaagaaccaaataactta

SEQ ID NO: 4172 - DNA, 94 bp, Artificial Sequence
  Description of Artificial Sequence: Synthetic primer
aatgatacggcgaccaccgagatctacaccctatcctacactctttccctacacgacgctcttccgatctgatgtagtagaggccgttaagcag

SEQ ID NO: 4173 - DNA, 89 bp, Artificial Sequence
  Description of Artificial Sequence: Synthetic primer
aatgatacggcgaccaccgagatctacaccctatcctacactctttccctacacgacgctcttccgatctagatgcctggccctcaccc

SEQ ID NO: 4174 - DNA, 94 bp, Artificial Sequence
  Description of Artificial Sequence: Synthetic primer
aatgatacggcgaccaccgagatctacaccctatcctacactctttccctacacgacgctcttccgatctagggcaagagtgggtcctttagtg

SEQ ID NO: 4175 - DNA, 91 bp, Artificial Sequence
  Description of Artificial Sequence: Synthetic primer
aatgatacggcgaccaccgagatctacaccctatcctacactctttccctacacgacgctcttccgatctgggacctcgatctctgcaccc

SEQ ID NO: 4176 - DNA, 90 bp, Artificial Sequence
  Description of Artificial Sequence: Synthetic primer
aatgatacggcgaccaccgagatctacaccctatcctacactctttccctacacgacgctcttccgatctcctcaccgagcaacagctcc

SEQ ID NO: 4177 - DNA, 91 bp, Artificial Sequence; identical to SEQ ID NO: 4175
  Description of Artificial Sequence: Synthetic primer

SEQ ID NO: 4178 - DNA, 91 bp, Artificial Sequence
  Description of Artificial Sequence: Synthetic primer
aatgatacggcgaccaccgagatctacaccctatcctacactctttccctacacgacgctcttccgatctttgtcgatgaggtccagtgcg

SEQ ID NO: 4179 - DNA, 99 bp, Artificial Sequence
  Description of Artificial Sequence: Synthetic primer
aatgatacggcgaccaccgagatctacaccctatcctacactctttccctacacgacgctcttccgatctgcagaagaaaaaaaacacaagagccctag

SEQ ID NO: 4180 - DNA, 92 bp, Artificial Sequence
  Description of Artificial Sequence: Synthetic primer
aatgatacggcgaccaccgagatctacaccctatcctacactctttccctacacgacgctcttccgatcttgtgccacacatctttgacctc

SEQ ID NO: 4181 - DNA, 102 bp, Artificial Sequence
  Description of Artificial Sequence: Synthetic polynucleotide
aatgatacggcgaccaccgagatctacaccctatcctacactctttccctacacgacgctcttccgatctacatgaataaatgagcatccattttgtttcag

SEQ ID NO: 4182 - DNA, 89 bp, Artificial Sequence
  Description of Artificial Sequence: Synthetic primer
aatgatacggcgaccaccgagatctacaccctatcctacactctttccctacacgacgctcttccgatctccgtggacctggctgagga

SEQ ID NO: 4183 - DNA, 96 bp, Artificial Sequence
  Description of Artificial Sequence: Synthetic primer
aatgatacggcgaccaccgagatctacaccctatcctacactctttccctacacgacgctcttccgatcttctgaccattctgttctctctggcag

SEQ ID NO: 4184 - DNA, 90 bp, Artificial Sequence
  Description of Artificial Sequence: Synthetic primer
aatgatacggcgaccaccgagatctacaccctatcctacactctttccctacacgacgctcttccgatcttggctggtcaccagagggtg

SEQ ID NO: 4185 - DNA, 88 bp, Artificial Sequence
  Description of Artificial Sequence: Synthetic primer
aatgatacggcgaccaccgagatctacaccctatcctacactctttccctacacgacgctcttccgatctctggaggcggcgagaaca

SEQ ID NO: 4186 - DNA, 89 bp, Artificial Sequence
  Description of Artificial Sequence: Synthetic primer
aatgatacggcgaccaccgagatctacaccctatcctacactctttccctacacgacgctcttccgatctcgcaagagccgcgacaagg

SEQ ID NO: 4187 - DNA, 89 bp, Artificial Sequence
  Description of Artificial Sequence: Synthetic primer
aatgatacggcgaccaccgagatctacaccctatcctacactctttccctacacgacgctcttccgatctgctacctggacggcaggct

SEQ ID NO: 4188 - DNA, 91 bp, Artificial Sequence
  Description of Artificial Sequence: Synthetic primer
aatgatacggcgaccaccgagatctacaccctatcctacactctttccctacacgacgctcttccgatctcgccatgccgggagaactcta

SEQ ID NO: 4189 - DNA, 90 bp, Artificial Sequence
  Description of Artificial Sequence: Synthetic primer
aatgatacggcgaccaccgagatctacaccctatcctacactctttccctacacgacgctcttccgatctctgccgagcagcagcagaag

SEQ ID NO: 4190 - DNA, 91 bp, Artificial Sequence
  Description of Artificial Sequence: Synthetic primer
aatgatacggcgaccaccgagatctacaccctatcctacactctttccctacacgacgctcttccgatctccatgggcatcctctgtccta

SEQ ID NO: 4191 - DNA, 94 bp, Artificial Sequence
  Description of Artificial Sequence: Synthetic primer
aatgatacggcgaccaccgagatctacaccctatcctacactctttccctacacgacgctcttccgatctgaagacaatgggcatggcctctta

SEQ ID NO: 4192 - DNA, 95 bp, Artificial Sequence
  Description of Artificial Sequence: Synthetic primer
aatgatacggcgaccaccgagatctacaccctatcctacactctttccctacacgacgctcttccgatctatctttgactgtgtctacacggttc

SEQ ID NO: 4193 - DNA, 92 bp, Artificial Sequence
  Description of Artificial Sequence: Synthetic primer
aatgatacggcgaccaccgagatctacaccctatcctacactctttccctacacgacgctcttccgatctagaaggcccaagactaaccctg

SEQ ID NO: 4194 - DNA, 92 bp, Artificial Sequence
  Description of Artificial Sequence: Synthetic primer
aatgatacggcgaccaccgagatctacaccctatcctacactctttccctacacgacgctcttccgatcttcttcccaccctagacctggac

SEQ ID NO: 4195 - DNA, 94 bp, Artificial Sequence
  Description of Artificial Sequence: Synthetic primer
aatgatacggcgaccaccgagatctacaccctatcctacactctttccctacacgacgctcttccgatcttgagcagtgcagtgatgatgagtg

SEQ ID NO: 4196 - DNA, 90 bp, Artificial Sequence
  Description of Artificial Sequence: Synthetic primer
aatgatacggcgaccaccgagatctacaccctatcctacactctttccctacacgacgctcttccgatctcactcagcacctccctcacc

SEQ ID NO: 4197 - DNA, 93 bp, Artificial Sequence
  Description of Artificial Sequence: Synthetic primer
aatgatacggcgaccaccgagatctacaccctatcctacactctttccctacacgacgctcttccgatctgggactgtggttcttcctcccag

SEQ ID NO: 4198 - DNA, 89 bp, Artificial Sequence
  Description of Artificial Sequence: Synthetic primer
aatgatacggcgaccaccgagatctacaccctatcctacactctttccctacacgacgctcttccgatctgggacctgtgtgcgtggca

SEQ ID NO: 4199 - DNA, 90 bp, Artificial Sequence
  Description of Artificial Sequence: Synthetic primer
aatgatacggcgaccaccgagatctacaccctatcctacactctttccctacacgacgctcttccgatctgtccaggaactgcctgccag

SEQ ID NO: 4200 - DNA, 93 bp, Artificial Sequence
  Description of Artificial Sequence: Synthetic primer
aatgatacggcgaccaccgagatctacaccctatcctacactctttccctacacgacgctcttccgatctgcctgctcactgctttgcttcat

SEQ ID NO: 4201 - DNA, 91 bp, Artificial Sequence
  Description of Artificial Sequence: Synthetic primer
aatgatacggcgaccaccgagatctacaccctatcctacactctttccctacacgacgctcttccgatctgccacattctgcttttgccag

SEQ ID NO: 4202 - DNA, 93 bp, Artificial Sequence
  Description of Artificial Sequence: Synthetic primer
aatgatacggcgaccaccgagatctacaccctatcctacactctttccctacacgacgctcttccgatctaacaccacctgattctctcctgc

SEQ ID NO: 4203 - DNA, 102 bp, Artificial Sequence
  Description of Artificial Sequence: Synthetic polynucleotide
aatgatacggcgaccaccgagatctacaccctatcctacactctttccctacacgacgctcttccgatctgacaaaatggacaaataaacaaggacatcttc

SEQ ID NO: 4204 - DNA, 101 bp, Artificial Sequence
  Description of Artificial Sequence: Synthetic polynucleotide
aatgatacggcgaccaccgagatctacaccctatcctacactctttccctacacgacgctcttccgatctatctttctaatccctaaactaccttggtata

SEQ ID NO: 4205 - DNA, 94 bp, Artificial Sequence
  Description of Artificial Sequence: Synthetic primer
aatgatacggcgaccaccgagatctacaccctatcctacactctttccctacacgacgctcttccgatctctctatcatgttcagggagcctgg

SEQ ID NO: 4206 - DNA, 89 bp, Artificial Sequence
  Description of Artificial Sequence: Synthetic primer
aatgatacggcgaccaccgagatctacaccctatcctacactctttccctacacgacgctcttccgatcttgccctgatgggtggcagg

SEQ ID NO: 4207 - DNA, 91 bp, Artificial Sequence
  Description of Artificial Sequence: Synthetic primer
aatgatacggcgaccaccgagatctacaccctatcctacactctttccctacacgacgctcttccgatctagggagggcagttgtaaccct

SEQ ID NO: 4208 - DNA, 90 bp, Artificial Sequence
  Description of Artificial Sequence: Synthetic primer
aatgatacggcgaccaccgagatctacaccctatcctacactctttccctacacgacgctcttccgatctctgtccctctctcccaccag

SEQ ID NO: 4209 - DNA, 87 bp, Artificial Sequence
  Description of Artificial Sequence: Synthetic primer
aatgatacggcgaccaccgagatctacaccctatcctacactctttccctacacgacgctcttccgatcttgcacctgcctgccact

SEQ ID NO: 4210 - DNA, 91 bp, Artificial Sequence
  Description of Artificial Sequence: Synthetic primer
aatgatacggcgaccaccgagatctacaccctatcctacactctttccctacacgacgctcttccgatcttaatggcaacgaagcagagcc

SEQ ID NO: 4211 - DNA, 94 bp, Artificial Sequence
  Description of Artificial Sequence: Synthetic primer
aatgatacggcgaccaccgagatctacaccctatcctacactctttccctacacgacgctcttccgatctccactcatacaggacttgggaggt

SEQ ID NO: 4212 - DNA, 94 bp, Artificial Sequence
  Description of Artificial Sequence: Synthetic primer
aatgatacggcgaccaccgagatctacaccctatcctacactctttccctacacgacgctcttccgatctgttttgtcagttcagggattgcac

SEQ ID NO: 4213 - DNA, 100 bp, Artificial Sequence
  Description of Artificial Sequence: Synthetic polynucleotide
aatgatacggcgaccaccgagatctacaccctatcctacactctttccctacacgacgctcttccgatcttcttctactttttagcttcaagcattctga

SEQ ID NO: 4214 - DNA, 98 bp, Artificial Sequence
  Description of Artificial Sequence: Synthetic primer
aatgatacggcgaccaccgagatctacaccctatcctacactctttccctacacgacgctcttccgatcttgcattctgactttcagtaaggcaatga

SEQ ID NO: 4215 - DNA, 92 bp, Artificial Sequence
  Description of Artificial Sequence: Synthetic primer
aatgatacggcgaccaccgagatctacaccctatcctacactctttccctacacgacgctcttccgatcttgcagccttattaaccaccacc

SEQ ID NO: 4216 - DNA, 105 bp, Artificial Sequence
  Description of Artificial Sequence: Synthetic polynucleotide
aatgatacggcgaccaccgagatctacaccctatcctacactctttccctacacgacgctcttccgatctgctccatgaaaaccacataaagaataattctctta

SEQ ID NO: 4217 - DNA, 91 bp, Artificial Sequence
  Description of Artificial Sequence: Synthetic primer
aatgatacggcgaccaccgagatctacaccctatcctacactctttccctacacgacgctcttccgatctggttatgcaaggtcccagcgg

SEQ ID NO: 4218 - DNA, 105 bp, Artificial Sequence; identical to SEQ ID NO: 4216
  Description of Artificial Sequence: Synthetic polynucleotide

SEQ ID NO: 4219 - DNA, 100 bp, Artificial Sequence
  Description of Artificial Sequence: Synthetic polynucleotide
aatgatacggcgaccaccgagatctacaccctatcctacactctttccctacacgacgctcttccgatctctgcagatgctatacacaagactcagaata

SEQ ID NO: 4220 - DNA, 98 bp, Artificial Sequence
  Description of Artificial Sequence: Synthetic primer
aatgatacggcgaccaccgagatctacaccctatcctacactctttccctacacgacgctcttccgatctcagatggtcagtacaagcacatactcat

SEQ ID NO: 4221 - DNA, 98 bp, Artificial Sequence
  Description of Artificial Sequence: Synthetic primer
aatgatacggcgaccaccgagatctacaccctatcctacactctttccctacacgacgctcttccgatctcaacagctagagatgcttcattttcaat

SEQ ID NO: 4222 - DNA, 98 bp, Artificial Sequence; identical to SEQ ID NO: 4220
  Description of Artificial Sequence: Synthetic primer

SEQ ID NO: 4223 - DNA, 92 bp, Artificial Sequence
  Description of Artificial Sequence: Synthetic primer
aatgatacggcgaccaccgagatctacaccctatcctacactctttccctacacgacgctcttccgatctgcttagacagccatccaacagc

SEQ ID NO: 4224 - DNA, 102 bp, Artificial Sequence
  Description of Artificial Sequence: Synthetic polynucleotide
aatgatacggcgaccaccgagatctacaccctatcctacactctttccctacacgacgctcttccgatctagatagccaggtatcactgtaagaatttacct

SEQ ID NO: 4225 - DNA, 102 bp, Artificial Sequence
  Description of Artificial Sequence: Synthetic polynucleotide
aatgatacggcgaccaccgagatctacaccctatcctacactctttccctacacgacgctcttccgatcttatggacataaaacctagaacacttcacttaa

SEQ ID NO: 4226 - DNA, 90 bp, Artificial Sequence
  Description of Artificial Sequence: Synthetic primer
aatgatacggcgaccaccgagatctacaccctatcctacactctttccctacacgacgctcttccgatcttcagaggagctgtggctccc

SEQ ID NO: 4227 - DNA, 97 bp, Artificial Sequence
  Description of Artificial Sequence: Synthetic primer
aatgatacggcgaccaccgagatctacaccctatcctacactctttccctacacgacgctcttccgatctccatacctgctctaggaaactaccaga

SEQ ID NO: 4228 - DNA, 99 bp, Artificial Sequence
  Description of Artificial Sequence: Synthetic primer
aatgatacggcgaccaccgagatctacaccctatcctacactctttccctacacgacgctcttccgatctttagcttgatctggagttaatcgagaaat

SEQ ID NO: 4229 - DNA, 99 bp, Artificial Sequence
  Description of Artificial Sequence: Synthetic primer
aatgatacggcgaccaccgagatctacaccctatcctacactctttccctacacgacgctcttccgatctgagtaaaagtattttacccaaactggctt

SEQ ID NO: 4230 - DNA, 93 bp, Artificial Sequence
  Description of Artificial Sequence: Synthetic primer
aatgatacggcgaccaccgagatctacaccctatcctacactctttccctacacgacgctcttccgatcttcctcttcttcacctccctgctg

SEQ ID NO: 4231 - DNA, 90 bp, Artificial Sequence
  Description of Artificial Sequence: Synthetic primer
aatgatacggcgaccaccgagatctacaccctatcctacactctttccctacacgacgctcttccgatctcccactctcaccctgcatct

SEQ ID NO: 4232 - DNA, 88 bp, Artificial Sequence
  Description of Artificial Sequence: Synthetic primer
aatgatacggcgaccaccgagatctacaccctatcctacactctttccctacacgacgctcttccgatctatagggcaggtgcggcga

SEQ ID NO: 4233 - DNA, 90 bp, Artificial Sequence
  Description of Artificial Sequence: Synthetic primer
aatgatacggcgaccaccgagatctacaccctatcctacactctttccctacacgacgctcttccgatctcgagtatgctctcggccctg

SEQ ID NO: 4234 - DNA, 91 bp, Artificial Sequence
  Description of Artificial Sequence: Synthetic primer
aatgatacggcgaccaccgagatctacaccctatcctacactctttccctacacgacgctcttccgatctacttgtccaggtgaacgcaga

SEQ ID NO: 4235 - DNA, 90 bp, Artificial Sequence
  Description of Artificial Sequence: Synthetic primer
aatgatacggcgaccaccgagatctacaccctatcctacactctttccctacacgacgctcttccgatctgacaaagccgtgagcaacgt

SEQ ID NO: 4236 - DNA, 90 bp, Artificial Sequence
  Description of Artificial Sequence: Synthetic primer
aatgatacggcgaccaccgagatctacaccctatcctacactctttccctacacgacgctcttccgatctgggctaatgccttcatggcc

SEQ ID NO: 4237 - DNA, 91 bp, Artificial Sequence
  Description of Artificial Sequence: Synthetic primer
aatgatacggcgaccaccgagatctacaccctatcctacactctttccctacacgacgctcttccgatcttcctggcttgacaagaggccc

SEQ ID NO: 4238 - DNA, 92 bp, Artificial Sequence
  Description of Artificial Sequence: Synthetic primer
aatgatacggcgaccaccgagatctacaccctatcctacactctttccctacacgacgctcttccgatctgcccatttggtagtgaggcagg

SEQ ID NO: 4239 - DNA, 99 bp, Artificial Sequence
  Description of Artificial Sequence: Synthetic primer
aatgatacggcgaccaccgagatctacaccctatcctacactctttccctacacgacgctcttccgatctctagcatatagctgagtaatagccatgtt

SEQ ID NO: 4240 - DNA, 96 bp, Artificial Sequence
  Description of Artificial Sequence: Synthetic primer
aatgatacggcgaccaccgagatctacaccctatcctacactctttccctacacgacgctcttccgatctacatgggctttcttgatgtaaccatc

SEQ ID NO: 4241 - DNA, 93 bp, Artificial Sequence
  Description of Artificial Sequence: Synthetic primer
aatgatacggcgaccaccgagatctacaccctatcctacactctttccctacacgacgctcttccgatctaatggagggtgtgcaagtcaatc

SEQ ID NO: 4242 - DNA, 98 bp, Artificial Sequence
  Description of Artificial Sequence: Synthetic primer
aatgatacggcgaccaccgagatctacaccctatcctacactctttccctacacgacgctcttccgatctaagtcaaaatatggtcttggacatccag

SEQ ID NO: 4243 - DNA, 90 bp, Artificial Sequence
  Description of Artificial Sequence: Synthetic primer
aatgatacggcgaccaccgagatctacaccctatcctacactctttccctacacgacgctcttccgatctgcttcctgggctagtgacct

SEQ ID NO: 4244 - DNA, 102 bp, Artificial Sequence
  Description of Artificial Sequence: Synthetic polynucleotide
aatgatacggcgaccaccgagatctacaccctatcctacactctttccctacacgacgctcttccgatctcaatttcccattctaataaagtttcccaggat

SEQ ID NO: 4245 - DNA, 93 bp, Artificial Sequence
  Description of Artificial Sequence: Synthetic primer
aatgatacggcgaccaccgagatctacaccctatcctacactctttccctacacgacgctcttccgatctccacactatgatttgtgcctcct

SEQ ID NO: 4246 - DNA, 93 bp, Artificial Sequence
  Description of Artificial Sequence: Synthetic primer
aatgatacggcgaccaccgagatctacaccctatcctacactctttccctacacgacgctcttccgatctcactggcttcagagcggaagtag

SEQ ID NO: 4247 - DNA, 94 bp, Artificial Sequence
  Description of Artificial Sequence: Synthetic primer
aatgatacggcgaccaccgagatctacaccctatcctacactctttccctacacgacgctcttccgatcttgtgcattcctccttcatcacctt

SEQ ID NO: 4248 - DNA, 94 bp, Artificial Sequence
  Description of Artificial Sequence: Synthetic primer
aatgatacggcgaccaccgagatctacaccctatcctacactctttccctacacgacgctcttccgatctcaactctccacccttcttcatccc

SEQ ID NO: 4249 - DNA, 94 bp, Artificial Sequence
  Description of Artificial Sequence: Synthetic primer
aatgatacggcgaccaccgagatctacaccctatcctacactctttccctacacgacgctcttccgatctcatgaccattctgcacctcctcac

SEQ ID NO: 4250 - DNA, 95 bp, Artificial Sequence
  Description of Artificial Sequence: Synthetic primer
aatgatacggcgaccaccgagatctacaccctatcctacactctttccctacacgacgctcttccgatcttacctacctgatgcttgctgaggtt

SEQ ID NO: 4251 - DNA, 97 bp, Artificial Sequence
  Description of Artificial Sequence: Synthetic primer
aatgatacggcgaccaccgagatctacaccctatcctacactctttccctacacgacgctcttccgatcttttttatccaaccaccttcttcgagct

SEQ ID NO: 4252 - DNA, 101 bp, Artificial Sequence
  Description of Artificial Sequence: Synthetic polynucleotide
aatgatacggcgaccaccgagatctacaccctatcctacactctttccctacacgacgctcttccgatctaggagtattcctggtcctaaagatgaaatac

SEQ ID NO: 4253 - DNA, 95 bp, Artificial Sequence
  Description of Artificial Sequence: Synthetic primer
aatgatacggcgaccaccgagatctacaccctatcctacactctttccctacacgacgctcttccgatctactttaaggctcactgctccctatt

SEQ ID NO: 4254 - DNA, 90 bp, Artificial Sequence
  Description of Artificial Sequence: Synthetic primer
aatgatacggcgaccaccgagatctacaccctatcctacactctttccctacacgacgctcttccgatcttgagcccacaagccagttgt

SEQ ID NO: 4255 - DNA, 95 bp, Artificial Sequence
  Description of Artificial Sequence: Synthetic primer
aatgatacggcgaccaccgagatctacaccctatcctacactctttccctacacgacgctcttccgatcttacacaggtccacatccattcatcc

SEQ ID NO: 4256 - DNA, 91 bp, Artificial Sequence
  Description of Artificial Sequence: Synthetic primer
aatgatacggcgaccaccgagatctacaccctatcctacactctttccctacacgacgctcttccgatctggacctgagccgtaggaacat

SEQ ID NO: 4257 - DNA, 90 bp, Artificial Sequence
  Description of Artificial Sequence: Synthetic primer
aatgatacggcgaccaccgagatctacaccctatcctacactctttccctacacgacgctcttccgatctccctgccctctctgcctttt

SEQ ID NO: 4258 - DNA, 94 bp, Artificial Sequence
  Description of Artificial Sequence: Synthetic primer
aatgatacggcgaccaccgagatctacaccctatcctacactctttccctacacgacgctcttccgatctaccagtgttggctggtgaatgaat

SEQ ID NO: 4259 - DNA, 98 bp, Artificial Sequence
  Description of Artificial Sequence: Synthetic primer
aatgatacggcgaccaccgagatctacaccctatcctacactctttccctacacgacgctcttccgatctatccaggtttctgttgttacagtctctc

SEQ ID NO: 4260 - DNA, 95 bp, Artificial Sequence
  Description of Artificial Sequence: Synthetic primer
aatgatacggcgaccaccgagatctacaccctatcctacactctttccctacacgacgctcttccgatctctcctccttggctcatcttcaaacc

SEQ ID NO: 4261 - DNA, 94 bp, Artificial Sequence
  Description of Artificial Sequence: Synthetic primer
aatgatacggcgaccaccgagatctacaccctatcctacactctttccctacacgacgctcttccgatctccggctcttctttgagttctaccg

SEQ ID NO: 4262 - DNA, 88 bp, Artificial Sequence
  Description of Artificial Sequence: Synthetic primer
aatgatacggcgaccaccgagatctacaccctatcctacactctttccctacacgacgctcttccgatctcctggacagcaggcccat

SEQ ID NO: 4263 - DNA, 93 bp, Artificial Sequence
  Description of Artificial Sequence: Synthetic primer
aatgatacggcgaccaccgagatctacaccctatcctacactctttccctacacgacgctcttccgatctccaagtaacggtgctgtctgctg

SEQ ID NO: 4264 - DNA, 88 bp, Artificial Sequence
  Description of Artificial Sequence: Synthetic primer
aatgatacggcgaccaccgagatctacaccctatcctacactctttccctacacgacgctcttccgatctagctcccttggctgagcc

SEQ ID NO: 4265 - DNA, 88 bp, Artificial Sequence
  Description of Artificial Sequence: Synthetic primer
aatgatacggcgaccaccgagatctacaccctatcctacactctttccctacacgacgctcttccgatctcccttcccgctgctgtct

SEQ ID NO: 4266 - DNA, 92 bp, Artificial Sequence
  Description of Artificial Sequence: Synthetic primer
aatgatacggcgaccaccgagatctacaccctatcctacactctttccctacacgacgctcttccgatctgcttttgcgtggagtgtgtgga

SEQ ID NO: 4267 - DNA, 88 bp, Artificial Sequence; identical to SEQ ID NO: 4265
  Description of Artificial Sequence: Synthetic primer

SEQ ID NO: 4268 - DNA, 90 bp, Artificial Sequence
  Description of Artificial Sequence: Synthetic primer
aatgatacggcgaccaccgagatctacaccctatcctacactctttccctacacgacgctcttccgatctggagaggcccttcggtggta

SEQ ID NO: 4269 - DNA, 91 bp, Artificial Sequence
  Description of Artificial Sequence: Synthetic primer
aatgatacggcgaccaccgagatctacaccctatcctacactctttccctacacgacgctcttccgatctcctctgacgccagctctcctc

SEQ ID NO: 4270 - DNA, 94 bp, Artificial Sequence
  Description of Artificial Sequence: Synthetic primer
aatgatacggcgaccaccgagatctacaccctatcctacactctttccctacacgacgctcttccgatctgtttcctgtcagcctgtaactgac

SEQ ID NO: 4271 - DNA, 88 bp, Artificial Sequence
  Description of Artificial Sequence: Synthetic primer
aatgatacggcgaccaccgagatctacaccctatcctacactctttccctacacgacgctcttccgatctaccctggcgtgtcaccct

SEQ ID NO: 4272 - DNA, 91 bp, Artificial Sequence
  Description of Artificial Sequence: Synthetic primer
aatgatacggcgaccaccgagatctacaccctatcctacactctttccctacacgacgctcttccgatcttgcaagtgtaagcctcggcaa

SEQ ID NO: 4273 - DNA, 97 bp, Artificial Sequence
  Description of Artificial Sequence: Synthetic primer
aatgatacggcgaccaccgagatctacaccctatcctacactctttccctacacgacgctcttccgatctcgtgaccactgtgtaatgatttctgct

SEQ ID NO: 4274 - DNA, 99 bp, Artificial Sequence
  Description of Artificial Sequence: Synthetic primer
aatgatacggcgaccaccgagatctacaccctatcctacactctttccctacacgacgctcttccgatctgagaggtcaaggtgactttttgttttttg

SEQ ID NO: 4275 - DNA, 102 bp, Artificial Sequence
  Description of Artificial Sequence: Synthetic polynucleotide
aatgatacggcgaccaccgagatctacaccctatcctacactctttccctacacgacgctcttccgatcttctcagagctaagtatcaaggatttcattctc

SEQ ID NO: 4276 - DNA, 87 bp, Artificial Sequence
  Description of Artificial Sequence: Synthetic primer
aatgatacggcgaccaccgagatctacaccctatcctacactctttccctacacgacgctcttccgatctacctgagcgcgactgca

SEQ ID NO: 4277 - DNA, 95 bp, Artificial Sequence
  Description of Artificial Sequence: Synthetic primer
aatgatacggcgaccaccgagatctacaccctatcctacactctttccctacacgacgctcttccgatctccctaatgccctaatgtctgtctct

SEQ ID NO: 4278 - DNA, 93 bp, Artificial Sequence
  Description of Artificial Sequence: Synthetic primer
aatgatacggcgaccaccgagatctacaccctatcctacactctttccctacacgacgctcttccgatctcactccagtaattctgccgacca

SEQ ID NO: 4279 - DNA, 94 bp, Artificial Sequence
  Description of Artificial Sequence: Synthetic primer
aatgatacggcgaccaccgagatctacaccctatcctacactctttccctacacgacgctcttccgatcttgaagcctcaagagcagtggaaaa

SEQ ID NO: 4280 - DNA, 99 bp, Artificial Sequence
  Description of Artificial Sequence: Synthetic primer
aatgatacggcgaccaccgagatctacaccctatcctacactctttccctacacgacgctcttccgatcttaaccctcctcttgtgtatctttcttaca

SEQ ID NO: 4281 - DNA, 92 bp, Artificial Sequence
  Description of Artificial Sequence: Synthetic primer
aatgatacggcgaccaccgagatctacaccctatcctacactctttccctacacgacgctcttccgatctggatccacctctggcctcacag

SEQ ID NO: 4282 - DNA, 97 bp, Artificial Sequence
  Description of Artificial Sequence: Synthetic primer
aatgatacggcgaccaccgagatctacaccctatcctacactctttccctacacgacgctcttccgatctgcctccaaagaccacgataattccttc

SEQ ID NO: 4283 - DNA, 100 bp, Artificial Sequence
  Description of Artificial Sequence: Synthetic polynucleotide
aatgatacggcgaccaccgagatctacaccctatcctacactctttccctacacgacgctcttccgatctcagtgacatcaataccctctatttctgttt

SEQ ID NO: 4284 - DNA, 101 bp, Artificial Sequence
  Description of Artificial Sequence: Synthetic polynucleotide
aatgatacggcgaccaccgagatctacaccctatcctacactctttccctacacgacgctcttccgatctaaatgagcttgctaagtaattcagtggctat

SEQ ID NO: 4285 - DNA, 99 bp, Artificial Sequence
  Description of Artificial Sequence: Synthetic primer
aatgatacggcgaccaccgagatctacaccctatcctacactctttccctacacgacgctcttccgatctaccatcaaggtaaaaattatgccaactat

SEQ ID NO: 4286 - DNA, 97 bp, Artificial Sequence
  Description of Artificial Sequence: Synthetic primer
aatgatacggcgaccaccgagatctacaccctatcctacactctttccctacacgacgctcttccgatcttcttctctgagctaacatgcttcctta

SEQ ID NO: 4287 - DNA, 100 bp, Artificial Sequence
  Description of Artificial Sequence: Synthetic polynucleotide
aatgatacggcgaccaccgagatctacaccctatcctacactctttccctacacgacgctcttccgatctaattatctcttggtttgacacttggttgac

SEQ ID NO: 4288 - DNA, 100 bp, Artificial Sequence
  Description of Artificial Sequence: Synthetic polynucleotide
aatgatacggcgaccaccgagatctacaccctatcctacactctttccctacacgacgctcttccgatctagtggtcagtgtgctaaccattgattattc

SEQ ID NO: 4289 - DNA, 98 bp, Artificial Sequence
  Description of Artificial Sequence: Synthetic primer
aatgatacggcgaccaccgagatctacaccctatcctacactctttccctacacgacgctcttccgatcttaagagctgcatgaaaatgttgatgtgt

SEQ ID NO: 4290 - DNA, 101 bp, Artificial Sequence
  Description of Artificial Sequence: Synthetic polynucleotide
aatgatacggcgaccaccgagatctacaccctatcctacactctttccctacacgacgctcttccgatctgttctatatttaaccgacctatttgaacagg

SEQ ID NO: 4291 - DNA, 100 bp, Artificial Sequence
  Description of Artificial Sequence: Synthetic polynucleotide
aatgatacggcgaccaccgagatctacaccctatcctacactctttccctacacgacgctcttccgatctctttgccttttctttcattttcctttcttg

SEQ ID NO: 4292 - DNA, 103 bp, Artificial Sequence
  Description of Artificial Sequence: Synthetic polynucleotide
aatgatacggcgaccaccgagatctacaccctatcctacactctttccctacacgacgctcttccgatcttgtacaactggataactacttgaacttatattc

SEQ ID NO: 4293 - DNA, 105 bp, Artificial Sequence
  Description of Artificial Sequence: Synthetic polynucleotide
aatgatacggcgaccaccgagatctacaccctatcctacactctttccctacacgacgctcttccgatcttctttgtcaaaaggagactcaatatctttactctt

SEQ ID NO: 4294 - DNA, 95 bp, Artificial Sequence
  Description of Artificial Sequence: Synthetic primer
aatgatacggcgaccaccgagatctacaccctatcctacactctttccctacacgacgctcttccgatcttttgccctcaccaaaactttctctc

SEQ ID NO: 4295 - DNA, 97 bp, Artificial Sequence
  Description of Artificial Sequence: Synthetic primer
aatgatacggcgaccaccgagatctacaccctatcctacactctttccctacacgacgctcttccgatctaccaagtattggtttgtattttgcagt

SEQ ID NO: 4296 - DNA, 96 bp, Artificial Sequence
  Description of Artificial Sequence: Synthetic primer
aatgatacggcgaccaccgagatctacaccctatcctacactctttccctacacgacgctcttccgatctatgtcgttggtttggctaacactaca

SEQ ID NO: 4297 - DNA, 95 bp, Artificial Sequence
  Description of Artificial Sequence: Synthetic primer
aatgatacggcgaccaccgagatctacaccctatcctacactctttccctacacgacgctcttccgatctcagttgtttgaatccctggaacaat

SEQ ID NO: 4298 - DNA, 99 bp, Artificial Sequence
  Description of Artificial Sequence: Synthetic primer
aatgatacggcgaccaccgagatctacaccctatcctacactctttccctacacgacgctcttccgatctcaagtttcttctctgttctgttttgtttt

SEQ ID NO: 4299 - DNA, 99 bp, Artificial Sequence
  Description of Artificial Sequence: Synthetic primer
aatgatacggcgaccaccgagatctacaccctatcctacactctttccctacacgacgctcttccgatctctgtcatgcagaaatggtttctctacttg

SEQ ID NO: 4300 - DNA, 103 bp, Artificial Sequence
  Description of Artificial Sequence: Synthetic polynucleotide
aatgatacggcgaccaccgagatctacaccctatcctacactctttccctacacgacgctcttccgatctacagatgttttcctctaagaatgacattatttc

SEQ ID NO: 4301 - DNA, 100 bp, Artificial Sequence
  Description of Artificial Sequence: Synthetic polynucleotide
aatgatacggcgaccaccgagatctacaccctatcctacactctttccctacacgacgctcttccgatcttttggctgacttttcattctttttgatgtt

SEQ ID NO: 4302 - DNA, 99 bp, Artificial Sequence
  Description of Artificial Sequence: Synthetic primer
aatgatacggcgaccaccgagatctacaccctatcctacactctttccctacacgacgctcttccgatctcaaagattggtcatttttctactgatgcc

SEQ ID NO: 4303 - DNA, 98 bp, Artificial Sequence
  Description of Artificial Sequence: Synthetic primer
aatgatacggcgaccaccgagatctacaccctatcctacactctttccctacacgacgctcttccgatctatgtttgaggatgtaagctagtttcaaa

SEQ ID NO: 4304 - DNA, 103 bp, Artificial Sequence
  Description of Artificial Sequence: Synthetic polynucleotide
aatgatacggcgaccaccgagatctacaccctatcctacactctttccctacacgacgctcttccgatcttaaaatgagagcacttttttttctgtttatccc

SEQ ID NO: 4305 - DNA, 100 bp, Artificial Sequence
  Description of Artificial Sequence: Synthetic polynucleotide
aatgatacggcgaccaccgagatctacaccctatcctacactctttccctacacgacgctcttccgatctgaaataatgtttgtcgtaatttggctgttt

SEQ ID NO: 4306 - DNA, 104 bp, Artificial Sequence
  Description of Artificial Sequence: Synthetic polynucleotide
aatgatacggcgaccaccgagatctacaccctatcctacactctttccctacacgacgctcttccgatctggactctgaatgagtataaggtagaaaatagatt

SEQ ID NO: 4307 - DNA, 105 bp, Artificial Sequence
  Description of Artificial Sequence: Synthetic polynucleotide
aatgatacggcgaccaccgagatctacaccctatcctacactctttccctacacgacgctcttccgatcttaactgcatagatacaatttttctcaggatcttag

SEQ ID NO: 4308 - DNA, 100 bp, Artificial Sequence
  Description of Artificial Sequence: Synthetic polynucleotide
aatgatacggcgaccaccgagatctacaccctatcctacactctttccctacacgacgctcttccgatctgagagagaccgtgtctcaaaataaataaaa

SEQ ID NO: 4309 - DNA, 92 bp, Artificial Sequence
  Description of Artificial Sequence: Synthetic primer
aatgatacggcgaccaccgagatctacaccctatcctacactctttccctacacgacgctcttccgatctaggacgcaaggagggtttgtca

SEQ ID NO: 4310 - DNA, 96 bp, Artificial Sequence
  Description of Artificial Sequence: Synthetic primer
aatgatacggcgaccaccgagatctacaccctatcctacactctttccctacacgacgctcttccgatcttgatctcaaggaaacaggaaaggacg

SEQ ID NO: 4311 - DNA, 98 bp, Artificial Sequence
  Description of Artificial Sequence: Synthetic primer
aatgatacggcgaccaccgagatctacaccctatcctacactctttccctacacgacgctcttccgatctgcctttctccacttagattttctccaat

SEQ ID NO: 4312 - DNA, 89 bp, Artificial Sequence
  Description of Artificial Sequence: Synthetic primer
aatgatacggcgaccaccgagatctacaccctatcctacactctttccctacacgacgctcttccgatctccttggcatcccagcctct

SEQ ID NO: 4313 - DNA, 96 bp, Artificial Sequence
  Description of Artificial Sequence: Synthetic primer
aatgatacggcgaccaccgagatctacaccctatcctacactctttccctacacgacgctcttccgatctgagatagtgtgtatgcgacacttaca

SEQ ID NO: 4314 - DNA, 94 bp, Artificial Sequence
  Description of Artificial Sequence: Synthetic primer
aatgatacggcgaccaccgagatctacaccctatcctacactctttccctacacgacgctcttccgatctggtctgaggctgttcactgactta

SEQ ID NO: 4315 - DNA, 90 bp, Artificial Sequence
  Description of Artificial Sequence: Synthetic primer
aatgatacggcgaccaccgagatctacaccctatcctacactctttccctacacgacgctcttccgatctctgctccagggaggctgctg

SEQ ID NO: 4316 - DNA, 94 bp, Artificial Sequence
  Description of Artificial Sequence: Synthetic primer
aatgatacggcgaccaccgagatctacaccctatcctacactctttccctacacgacgctcttccgatctcaaggatgcctgaccagttagagg

SEQ ID NO: 4317 - DNA, 90 bp, Artificial Sequence
  Description of Artificial Sequence: Synthetic primer
aatgatacggcgaccaccgagatctacaccctatcctacactctttccctacacgacgctcttccgatctctcagcagccgagaacaagc

SEQ ID NO: 4318 - DNA, 94 bp, Artificial Sequence
  Description of Artificial Sequence: Synthetic primer
aatgatacggcgaccaccgagatctacaccctatcctacactctttccctacacgacgctcttccgatctgccactgatggaggtgcagttttt

SEQ ID NO: 4319 - DNA, 99 bp, Artificial Sequence
  Description of Artificial Sequence: Synthetic primer
aatgatacggcgaccaccgagatctacaccctatcctacactctttccctacacgacgctcttccgatctatgtcgaaaagttctctctctaaaacact

SEQ ID NO: 4320 - DNA, 100 bp, Artificial Sequence
  Description of Artificial Sequence: Synthetic polynucleotide
aatgatacggcgaccaccgagatctacaccctatcctacactctttccctacacgacgctcttccgatctactaaaaaggcaaatgtaatctaccaggct

SEQ ID NO: 4321 - DNA, 100 bp, Artificial Sequence
  Description of Artificial Sequence: Synthetic polynucleotide
aatgatacggcgaccaccgagatctacaccctatcctacactctttccctacacgacgctcttccgatctacccattagaaccaactccataaactaaac

SEQ ID NO: 4322 - DNA, 97 bp, Artificial Sequence
  Description of Artificial Sequence: Synthetic primer
aatgatacggcgaccaccgagatctacaccctatcctacactctttccctacacgacgctcttccgatctataacaacaacctggagccttattttt

SEQ ID NO: 4323 - DNA, 93 bp, Artificial Sequence
  Description of Artificial Sequence: Synthetic primer
aatgatacggcgaccaccgagatctacaccctatcctacactctttccctacacgacgctcttccgatctccttcccatgaaatggacgtgga

SEQ ID NO: 4324 - DNA, 100 bp, Artificial Sequence
  Description of Artificial Sequence: Synthetic polynucleotide
aatgatacggcgaccaccgagatctacaccctatcctacactctttccctacacgacgctcttccgatctaaatgttctgttctccttcactttccactc

SEQ ID NO: 4325 - DNA, 94 bp, Artificial Sequence
  Description of Artificial Sequence: Synthetic primer
aatgatacggcgaccaccgagatctacaccctatcctacactctttccctacacgacgctcttccgatctaggaaatgcagttttagtgggaga

SEQ ID NO: 4326 - DNA, 96 bp, Artificial Sequence
  Description of Artificial Sequence: Synthetic primer
aatgatacggcgaccaccgagatctacaccctatcctacactctttccctacacgacgctcttccgatctaaggcagaataacatggctttgagac

SEQ ID NO: 4327 - DNA, 91 bp, Artificial Sequence
  Description of Artificial Sequence: Synthetic primer
aatgatacggcgaccaccgagatctacaccctatcctacactctttccctacacgacgctcttccgatctggtggcagaaaggaaaagcgg

SEQ ID NO: 4328 - DNA, 95 bp, Artificial Sequence
  Description of Artificial Sequence: Synthetic primer
aatgatacggcgaccaccgagatctacaccctatcctacactctttccctacacgacgctcttccgatctgtgacacagagctgtgaacacttac

SEQ ID NO: 4329 - DNA, 90 bp, Artificial Sequence
  Description of Artificial Sequence: Synthetic primer
aatgatacggcgaccaccgagatctacaccctatcctacactctttccctacacgacgctcttccgatctcccacccaggactggcactc

SEQ ID NO: 4330 - DNA, 89 bp, Artificial Sequence
  Description of Artificial Sequence: Synthetic primer
aatgatacggcgaccaccgagatctacaccctatcctacactctttccctacacgacgctcttccgatctgaccatgagaggccctgcg

SEQ ID NO: 4331 - DNA, 93 bp, Artificial Sequence
  Description of Artificial Sequence: Synthetic primer
aatgatacggcgaccaccgagatctacaccctatcctacactctttccctacacgacgctcttccgatctaaaaggtgggcctgaggttcaga

SEQ ID NO: 4332 - DNA, 95 bp, Artificial Sequence
  Description of Artificial Sequence: Synthetic primer
aatgatacggcgaccaccgagatctacaccctatcctacactctttccctacacgacgctcttccgatctcccgtatctcccttccctgattacc

SEQ ID NO: 4333 - DNA, 95 bp, Artificial Sequence
  Description of Artificial Sequence: Synthetic primer
aatgatacggcgaccaccgagatctacaccctatcctacactctttccctacacgacgctcttccgatctgctgacctaaagccacctccttact

SEQ ID NO: 4334 - DNA, 92 bp, Artificial Sequence
  Description of Artificial Sequence: Synthetic primer
aatgatacggcgaccaccgagatctacaccctatcctacactctttccctacacgacgctcttccgatcttaaaagccagcttggcctcagt

SEQ ID NO: 4335 - DNA, 92 bp, Artificial Sequence
  Description of Artificial Sequence: Synthetic primer
aatgatacggcgaccaccgagatctacaccctatcctacactctttccctacacgacgctcttccgatctcagctaggcagtgtggacagac

SEQ ID NO: 4336 - DNA, 92 bp, Artificial Sequence
  Description of Artificial Sequence: Synthetic primer
aatgatacggcgaccaccgagatctacaccctatcctacactctttccctacacgacgctcttccgatctgggactcttcccaatggaagca

SEQ ID NO: 4337 - DNA, 97 bp, Artificial Sequence
  Description of Artificial Sequence: Synthetic primer
aatgatacggcgaccaccgagatctacaccctatcctacactctttccctacacgacgctcttccgatctttgttcaaatgagtagacacagcttga

SEQ ID NO: 4338 - DNA, 98 bp, Artificial Sequence
  Description of Artificial Sequence: Synthetic primer
aatgatacggcgaccaccgagatctacaccctatcctacactctttccctacacgacgctcttccgatctagtggagagctgtaaattctggcttata

SEQ ID NO: 4339 - DNA, 92 bp, Artificial Sequence
  Description of Artificial Sequence: Synthetic primer
aatgatacggcgaccaccgagatctacaccctatcctacactctttccctacacgacgctcttccgatctgagtgggtcgaggaggttgagg

SEQ ID NO: 4340 - DNA, 92 bp, Artificial Sequence
  Description of Artificial Sequence: Synthetic primer
aatgatacggcgaccaccgagatctacaccctatcctacactctttccctacacgacgctcttccgatcttcctggtagtgtgggtctctgc

SEQ ID NO: 4341 - DNA, 95 bp, Artificial Sequence
  Description of Artificial Sequence: Synthetic primer
aatgatacggcgaccaccgagatctacaccctatcctacactctttccctacacgacgctcttccgatctctgggtatcgaaagagtctggattt

SEQ ID NO: 4342 - DNA, 90 bp, Artificial Sequence
  Description of Artificial Sequence: Synthetic primer
aatgatacggcgaccaccgagatctacaccctatcctacactctttccctacacgacgctcttccgatctgtgctctcgcgccacttacc

SEQ ID NO: 4343 - DNA, 97 bp, Artificial Sequence
  Description of Artificial Sequence: Synthetic primer
aatgatacggcgaccaccgagatctacaccctatcctacactctttccctacacgacgctcttccgatctgaataaagaggagcaggttgaggaagg

SEQ ID NO: 4344 - DNA, 94 bp, Artificial Sequence
  Description of Artificial Sequence: Synthetic primer
aatgatacggcgaccaccgagatctacaccctatcctacactctttccctacacgacgctcttccgatctatggcaaacttcccatcgtagacc

SEQ ID NO: 4345 - DNA, 95 bp, Artificial Sequence
  Description of Artificial Sequence: Synthetic primer
aatgatacggcgaccaccgagatctacaccctatcctacactctttccctacacgacgctcttccgatctgccctctattgcttagggagcaatg

SEQ ID NO: 4346 - DNA, 91 bp, Artificial Sequence
  Description of Artificial Sequence: Synthetic primer
aatgatacggcgaccaccgagatctacaccctatcctacactctttccctacacgacgctcttccgatctctctggtttggtgggactggg

SEQ ID NO: 4347 - DNA, 91 bp, Artificial Sequence
  Description of Artificial Sequence: Synthetic primer
aatgatacggcgaccaccgagatctacaccctatcctacactctttccctacacgacgctcttccgatctccacagtgttgacccaggctt

SEQ ID NO: 4348 - DNA, 95 bp, Artificial Sequence
  Description of Artificial Sequence: Synthetic primer
aatgatacggcgaccaccgagatctacaccctatcctacactctttccctacacgacgctcttccgatctcaatttcagaacccaggcaatggaa

SEQ ID NO: 4349 - DNA, 95 bp, Artificial Sequence
  Description of Artificial Sequence: Synthetic primer
aatgatacggcgaccaccgagatctacaccctatcctacactctttccctacacgacgctcttccgatcttcttggtcactatggaaggagagaa

SEQ ID NO: 4350 - DNA, 103 bp, Artificial Sequence
  Description of Artificial Sequence: Synthetic polynucleotide
aatgatacggcgaccaccgagatctacaccctatcctacactctttccctacacgacgctcttccgatctccacaattttgtctaaaatcttggatctactat

SEQ ID NO: 4351 - DNA, 90 bp, Artificial Sequence
  Description of Artificial Sequence: Synthetic primer
aatgatacggcgaccaccgagatctacaccctatcctacactctttccctacacgacgctcttccgatcttgtgtcctgagggcctgagc

SEQ ID NO: 4352 - DNA, 103 bp, Artificial Sequence; identical to SEQ ID NO: 4350
  Description of Artificial Sequence: Synthetic polynucleotide

SEQ ID NO: 4353 - DNA, 92 bp, Artificial Sequence
  Description of Artificial Sequence: Synthetic primer
aatgatacggcgaccaccgagatctacaccctatcctacactctttccctacacgacgctcttccgatctacaaggctcacacatcttgagc

SEQ ID NO: 4354 - DNA, 93 bp, Artificial Sequence
  Description of Artificial Sequence: Synthetic primer
aatgatacggcgaccaccgagatctacaccctatcctacactctttccctacacgacgctcttccgatctaggagggaaggcaggatctctaa

SEQ ID NO: 4355 - DNA, 94 bp, Artificial Sequence
  Description of Artificial Sequence: Synthetic primer
aatgatacggcgaccaccgagatctacaccctatcctacactctttccctacacgacgctcttccgatctccactcacctgtgatctcccgtac

SEQ ID NO: 4356 - DNA, 93 bp, Artificial Sequence
  Description of Artificial Sequence: Synthetic primer
aatgatacggcgaccaccgagatctacaccctatcctacactctttccctacacgacgctcttccgatctcctgaagatgccatttcctccat

SEQ ID NO: 4357 - DNA, 94 bp, Artificial Sequence
  Description of Artificial Sequence: Synthetic primer
aatgatacggcgaccaccgagatctacaccctatcctacactctttccctacacgacgctcttccgatctatatgggcagggagccttcttctt

SEQ ID NO: 4358 - DNA, 94 bp, Artificial Sequence
  Description of Artificial Sequence: Synthetic primer
aatgatacggcgaccaccgagatctacaccctatcctacactctttccctacacgacgctcttccgatcttgatgtctagtcgctcttccgtag

SEQ ID NO: 4359 - DNA, 93 bp, Artificial Sequence
  Description of Artificial Sequence: Synthetic primer
aatgatacggcgaccaccgagatctacaccctatcctacactctttccctacacgacgctcttccgatctcctcaatcccaccaaggcacatg

SEQ ID NO: 4360 - DNA, 96 bp, Artificial Sequence
  Description of Artificial Sequence: Synthetic primer
aatgatacggcgaccaccgagatctacaccctatcctacactctttccctacacgacgctcttccgatctctctccttattatcccatcactgacc

SEQ ID NO: 4361 - DNA, 92 bp, Artificial Sequence
  Description of Artificial Sequence: Synthetic primer
aatgatacggcgaccaccgagatctacaccctatcctacactctttccctacacgacgctcttccgatctactgctgtatgagacagtgcct

SEQ ID NO: 4362 - DNA, 92 bp, Artificial Sequence
  Description of Artificial Sequence: Synthetic primer
aatgatacggcgaccaccgagatctacaccctatcctacactctttccctacacgacgctcttccgatctcctcaaccctactcccacgtct

SEQ ID NO: 4363 - DNA, 93 bp, Artificial Sequence
  Description of Artificial Sequence: Synthetic primer
aatgatacggcgaccaccgagatctacaccctatcctacactctttccctacacgacgctcttccgatctttcggcctcatgggcaaattctc

SEQ ID NO: 4364 - DNA, 96 bp, Artificial Sequence; identical to SEQ ID NO: 4360
  Description of Artificial Sequence: Synthetic primer

SEQ ID NO: 4365 - DNA, 93 bp, Artificial Sequence; identical to SEQ ID NO: 4359
  Description of Artificial Sequence: Synthetic primer

SEQ ID NO: 4366 - DNA, 96 bp, Artificial Sequence; identical to SEQ ID NO: 4360
  Description of Artificial Sequence: Synthetic primer

SEQ ID NO: 4367 - DNA, 94 bp, Artificial Sequence
  Description of Artificial Sequence: Synthetic primer
aatgatacggcgaccaccgagatctacaccctatcctacactctttccctacacgacgctcttccgatctcccttggagatcctggtgctacta

SEQ ID NO: 4368 - DNA, 96 bp, Artificial Sequence; identical to SEQ ID NO: 4360
  Description of Artificial Sequence: Synthetic primer

SEQ ID NO: 4369 - DNA, 93 bp, Artificial Sequence
  Description of Artificial Sequence: Synthetic primer
aatgatacggcgaccaccgagatctacaccctatcctacactctttccctacacgacgctcttccgatctcacctctctcccaactcccaaat

SEQ ID NO: 4370 - DNA, 100 bp, Artificial Sequence
  Description of Artificial Sequence: Synthetic polynucleotide
aatgatacggcgaccaccgagatctacaccctatcctacactctttccctacacgacgctcttccgatctgagacttccaggacatgcaaaaaaagaaaa

SEQ ID NO: 4371 - DNA, 93 bp, Artificial Sequence
  Description of Artificial Sequence: Synthetic primer
aatgatacggcgaccaccgagatctacaccctatcctacactctttccctacacgacgctcttccgatctggatccacactccctgggaagtt

SEQ ID NO: 4372 - DNA, 93 bp, Artificial Sequence
  Description of Artificial Sequence: Synthetic primer
aatgatacggcgaccaccgagatctacaccctatcctacactctttccctacacgacgctcttccgatctaattcctccaggcttctctcacc

SEQ ID NO: 4373 - DNA, 93 bp, Artificial Sequence
  Description of Artificial Sequence: Synthetic primer
aatgatacggcgaccaccgagatctacaccctatcctacactctttccctacacgacgctcttccgatcttcctagcggcatacagaatttcc

SEQ ID NO: 4374 - DNA, 93 bp, Artificial Sequence; identical to SEQ ID NO: 4372
  Description of Artificial Sequence: Synthetic primer

SEQ ID NO: 4375 - DNA, 91 bp, Artificial Sequence
  Description of Artificial Sequence: Synthetic primer
aatgatacggcgaccaccgagatctacaccctatcctacactctttccctacacgacgctcttccgatctccgcctccttaccctttgtgt

SEQ ID NO: 4376 - DNA, 104 bp, Artificial Sequence
  Description of Artificial Sequence: Synthetic polynucleotide
aatgatacggcgaccaccgagatctacaccctatcctacactctttccctacacgacgctcttccgatctaacacaaaaatctgaagtgcttagagattctaag

SEQ ID NO: 4377 - DNA, 100 bp, Artificial Sequence
  Description of Artificial Sequence: Synthetic polynucleotide
aatgatacggcgaccaccgagatctacaccctatcctacactctttccctacacgacgctcttccgatctaaaaagaaaaaaagagaaaatggttgggct

SEQ ID NO: 4378 - DNA, 95 bp, Artificial Sequence
  Description of Artificial Sequence: Synthetic primer
aatgatacggcgaccaccgagatctacaccctatcctacactctttccctacacgacgctcttccgatctccaggcccactctctctctatatcg

SEQ ID NO: 4379 - DNA, 100 bp, Artificial Sequence
  Description of Artificial Sequence: Synthetic polynucleotide
aatgatacggcgaccaccgagatctacaccctatcctacactctttccctacacgacgctcttccgatcttaatgtcttccatactactcgtatcaatct

SEQ ID NO: 4380 - DNA, 89 bp, Artificial Sequence
  Description of Artificial Sequence: Synthetic primer
aatgatacggcgaccaccgagatctacaccctatcctacactctttccctacacgacgctcttccgatctagcccagtgtggtggttgc

SEQ ID NO: 4381 - DNA, 100 bp, Artificial Sequence; identical to SEQ ID NO: 4379
  Description of Artificial Sequence: Synthetic polynucleotide

SEQ ID NO: 4382 - DNA, 91 bp, Artificial Sequence
  Description of Artificial Sequence: Synthetic primer
aatgatacggcgaccaccgagatctacaccctatcctacactctttccctacacgacgctcttccgatctaatggtaggcgctatctccgc

SEQ ID NO: 4383 - DNA, 90 bp, Artificial Sequence
  Description of Artificial Sequence: Synthetic primer
aatgatacggcgaccaccgagatctacaccctatcctacactctttccctacacgacgctcttccgatctggatgaggtggactgtgcct

SEQ ID NO: 4384 - DNA, 95 bp, Artificial Sequence
  Description of Artificial Sequence: Synthetic primer
aatgatacggcgaccaccgagatctacaccctatcctacactctttccctacacgacgctcttccgatctctgccattaaatgctccctgagtgc

SEQ ID NO: 4385 - DNA, 93 bp, Artificial Sequence
  Description of Artificial Sequence: Synthetic primer
aatgatacggcgaccaccgagatctacaccctatcctacactctttccctacacgacgctcttccgatctcccttcagcacccagactacctg

SEQ ID NO: 4386 - DNA, 99 bp, Artificial Sequence
  Description of Artificial Sequence: Synthetic primer
aatgatacggcgaccaccgagatctacaccctatcctacactctttccctacacgacgctcttccgatctttccagaaactagaggttagctgatattt

SEQ ID NO: 4387 - DNA, 93 bp, Artificial Sequence
  Description of Artificial Sequence: Synthetic primer
aatgatacggcgaccaccgagatctacaccctatcctacactctttccctacacgacgctcttccgatctgtagcacccagaggtacagtgct

SEQ ID NO: 4388 - DNA, 94 bp, Artificial Sequence
  Description of Artificial Sequence: Synthetic primer
aatgatacggcgaccaccgagatctacaccctatcctacactctttccctacacgacgctcttccgatctatttctaacaacgccttctctcca

SEQ ID NO: 4389 - DNA, 103 bp, Artificial Sequence
  Description of Artificial Sequence: Synthetic polynucleotide
aatgatacggcgaccaccgagatctacaccctatcctacactctttccctacacgacgctcttccgatctcatattgcctcttattatatccatcattccatt

SEQ ID NO: 4390 - DNA, 96 bp, Artificial Sequence
  Description of Artificial Sequence: Synthetic primer
aatgatacggcgaccaccgagatctacaccctatcctacactctttccctacacgacgctcttccgatctagagcaagaattgactcgaatagggt

SEQ ID NO: 4391 - DNA, 97 bp, Artificial Sequence
  Description of Artificial Sequence: Synthetic primer
aatgatacggcgaccaccgagatctacaccctatcctacactctttccctacacgacgctcttccgatctaagaatcatatttgtgtctgatgggca

SEQ ID NO: 4392 - DNA, 102 bp, Artificial Sequence
  Description of Artificial Sequence: Synthetic polynucleotide
aatgatacggcgaccaccgagatctacaccctatcctacactctttccctacacgacgctcttccgatctgttacgaatatagtgacattttcactgtgtaa

SEQ ID NO: 4393 - DNA, 99 bp, Artificial Sequence
  Description of Artificial Sequence: Synthetic primer
aatgatacggcgaccaccgagatctacaccctatcctacactctttccctacacgacgctcttccgatctactactggtatagtgctggtttgttcaac

SEQ ID NO: 4394 - DNA, 105 bp, Artificial Sequence
  Description of Artificial Sequence: Synthetic polynucleotide
aatgatacggcgaccaccgagatctacaccctatcctacactctttccctacacgacgctcttccgatctcccaaagactcacatttaggaaatacatatagaaa

SEQ ID NO: 4395 - DNA, 96 bp, Artificial Sequence
  Description of Artificial Sequence: Synthetic primer
aatgatacggcgaccaccgagatctacaccctatcctacactctttccctacacgacgctcttccgatcttttagaaaaatgggaaaacctgggca

SEQ ID NO: 4396 - DNA, 100 bp, Artificial Sequence
  Description of Artificial Sequence: Synthetic polynucleotide
aatgatacggcgaccaccgagatctacaccctatcctacactctttccctacacgacgctcttccgatctgagttgaaatcatggtattgcatttttttc

SEQ ID NO: 4397 - DNA, 102 bp, Artificial Sequence
  Description of Artificial Sequence: Synthetic polynucleotide
aatgatacggcgaccaccgagatctacaccctatcctacactctttccctacacgacgctcttccgatctctttgtaagaacttaataggttgagatgtcat

SEQ ID NO: 4398 - DNA, 102 bp, Artificial Sequence
  Description of Artificial Sequence: Synthetic polynucleotide
aatgatacggcgaccaccgagatctacaccctatcctacactctttccctacacgacgctcttccgatctctatcggactgaaagtataaccttcttctttc

SEQ ID NO: 4399 - DNA, 101 bp, Artificial Sequence
  Description of Artificial Sequence: Synthetic polynucleotide
aatgatacggcgaccaccgagatctacaccctatcctacactctttccctacacgacgctcttccgatcttcttttctcttcctctgtcttctctctcttc

SEQ ID NO: 4400 - DNA, 94 bp, Artificial Sequence
  Description of Artificial Sequence: Synthetic primer
aatgatacggcgaccaccgagatctacaccctatcctacactctttccctacacgacgctcttccgatcttgcatgtcactgtggatggagaat

SEQ ID NO: 4401 - DNA, 98 bp, Artificial Sequence
  Description of Artificial Sequence: Synthetic primer
aatgatacggcgaccaccgagatctacaccctatcctacactctttccctacacgacgctcttccgatctttccagaggaaatgacaccacttttctt

SEQ ID NO: 4402 - DNA, 96 bp, Artificial Sequence
  Description of Artificial Sequence: Synthetic primer
aatgatacggcgaccaccgagatctacaccctatcctacactctttccctacacgacgctcttccgatctctcctcatgtggctgatgttttcaca

SEQ ID NO: 4403 - DNA, 102 bp, Artificial Sequence
  Description of Artificial Sequence: Synthetic polynucleotide
aatgatacggcgaccaccgagatctacaccctatcctacactctttccctacacgacgctcttccgatctcctaggaagattttaagttttgacacaatcct

SEQ ID NO: 4404 - DNA, 95 bp, Artificial Sequence
  Description of Artificial Sequence: Synthetic primer
aatgatacggcgaccaccgagatctacaccctatcctacactctttccctacacgacgctcttccgatctgaatgcgtttcatggttccgttttc

SEQ ID NO: 4405 - DNA, 102 bp, Artificial Sequence
  Description of Artificial Sequence: Synthetic polynucleotide
aatgatacggcgaccaccgagatctacaccctatcctacactctttccctacacgacgctcttccgatctatcagcactaatactaagacaatgatattctg

SEQ ID NO: 4406 - DNA, 101 bp, Artificial Sequence
  Description of Artificial Sequence: Synthetic polynucleotide
aatgatacggcgaccaccgagatctacaccctatcctacactctttccctacacgacgctcttccgatctaatttggctacatctcttcttgattttctag

SEQ ID NO: 4407 - DNA, 96 bp, Artificial Sequence
  Description of Artificial Sequence: Synthetic primer
aatgatacggcgaccaccgagatctacaccctatcctacactctttccctacacgacgctcttccgatctccctaactctgagtcttgtttctaca

SEQ ID NO: 4408 - DNA, 102 bp, Artificial Sequence
  Description of Artificial Sequence: Synthetic polynucleotide
aatgatacggcgaccaccgagatctacaccctatcctacactctttccctacacgacgctcttccgatctctaaaatatcttgttttgagcttgtttgctga

SEQ ID NO: 4409 - DNA, 105 bp, Artificial Sequence
  Description of Artificial Sequence: Synthetic polynucleotide
aatgatacggcgaccaccgagatctacaccctatcctacactctttccctacacgacgctcttccgatctaaatgtccacgtaagtaacagaataagaataacca

SEQ ID NO: 4410 - DNA, 102 bp, Artificial Sequence
  Description of Artificial Sequence: Synthetic polynucleotide
aatgatacggcgaccaccgagatctacaccctatcctacactctttccctacacgacgctcttccgatctgcagcgtttcattaacaagtattatgagttta

SEQ ID NO: 4411 - DNA, 95 bp, Artificial Sequence
  Description of Artificial Sequence: Synthetic primer
aatgatacggcgaccaccgagatctacaccctatcctacactctttccctacacgacgctcttccgatcttttctcctggtggcagactttgatc

SEQ ID NO: 4412 - DNA, 95 bp, Artificial Sequence
  Description of Artificial Sequence: Synthetic primer
aatgatacggcgaccaccgagatctacaccctatcctacactctttccctacacgacgctcttccgatcttcctttttcccttttcgtgttctgc

SEQ ID NO: 4413 - DNA, 102 bp, Artificial Sequence
  Description of Artificial Sequence: Synthetic polynucleotide
aatgatacggcgaccaccgagatctacaccctatcctacactctttccctacacgacgctcttccgatctgttgattaccttttcatcaacaagcagtttga

SEQ ID NO: 4414 - DNA, 102 bp, Artificial Sequence
  Description of Artificial Sequence: Synthetic polynucleotide
aatgatacggcgaccaccgagatctacaccctatcctacactctttccctacacgacgctcttccgatctaattgctacatatacagagtgacaaattcgtt

SEQ ID NO: 4415 - DNA, 103 bp, Artificial Sequence
  Description of Artificial Sequence: Synthetic polynucleotide
aatgatacggcgaccaccgagatctacaccctatcctacactctttccctacacgacgctcttccgatcttgcgcatatcatataaaggttatgtaatttcac

SEQ ID NO: 4416 - DNA, 93 bp, Artificial Sequence
  Description of Artificial Sequence: Synthetic primer
aatgatacggcgaccaccgagatctacaccctatcctacactctttccctacacgacgctcttccgatctgtcagcacgggatctgagacttc

SEQ ID NO: 4417 - DNA, 99 bp, Artificial Sequence
  Description of Artificial Sequence: Synthetic primer
aatgatacggcgaccaccgagatctacaccctatcctacactctttccctacacgacgctcttccgatctctcctttaatgactggttcctcatttttt

SEQ ID NO: 4418 - DNA, 93 bp, Artificial Sequence
  Description of Artificial Sequence: Synthetic primer
aatgatacggcgaccaccgagatctacaccctatcctacactctttccctacacgacgctcttccgatctgctcatcgccgcatcaagagaag

SEQ ID NO: 4419 - DNA, 93 bp, Artificial Sequence
  Description of Artificial Sequence: Synthetic primer
aatgatacggcgaccaccgagatctacaccctatcctacactctttccctacacgacgctcttccgatctcagtcttgctggcctttcttctt

SEQ ID NO: 4420 - DNA, 93 bp, Artificial Sequence
  Description of Artificial Sequence: Synthetic primer
aatgatacggcgaccaccgagatctacaccctatcctacactctttccctacacgacgctcttccgatctccggctgccctgtatcctgttat

SEQ ID NO: 4421 - DNA, 99 bp, Artificial Sequence
  Description of Artificial Sequence: Synthetic primer
aatgatacggcgaccaccgagatctacaccctatcctacactctttccctacacgacgctcttccgatctaggtttctaattctgattttctcctccag

SEQ ID NO: 4422 - DNA, 94 bp, Artificial Sequence
  Description of Artificial Sequence: Synthetic primer
aatgatacggcgaccaccgagatctacaccctatcctacactctttccctacacgacgctcttccgatcttgaagagactgagacctctcaact

SEQ ID NO: 4423 - DNA, 94 bp, Artificial Sequence
  Description of Artificial Sequence: Synthetic primer
aatgatacggcgaccaccgagatctacaccctatcctacactctttccctacacgacgctcttccgatctcctattgatggcttctgcccttcg

SEQ ID NO: 4424 - DNA, 91 bp, Artificial Sequence
  Description of Artificial Sequence: Synthetic primer
aatgatacggcgaccaccgagatctacaccctatcctacactctttccctacacgacgctcttccgatcttcagatgtcctctgctcaccc

SEQ ID NO: 4425 - DNA, 90 bp, Artificial Sequence
  Description of Artificial Sequence: Synthetic primer
aatgatacggcgaccaccgagatctacaccctatcctacactctttccctacacgacgctcttccgatcttggcaccttccctttcaggc

SEQ ID NO: 4426 - DNA, 87 bp, Artificial Sequence
  Description of Artificial Sequence: Synthetic primer
aatgatacggcgaccaccgagatctacaccctatcctacactctttccctacacgacgctcttccgatcttgctccaatccgcgcct

SEQ ID NO: 4427 - DNA, 99 bp, Artificial Sequence
  Description of Artificial Sequence: Synthetic primer
aatgatacggcgaccaccgagatctacaccctatcctacactctttccctacacgacgctcttccgatcttttaagccaataaaactctttccaactca

SEQ ID NO: 4428 - DNA, 99 bp, Artificial Sequence
  Description of Artificial Sequence: Synthetic primer
aatgatacggcgaccaccgagatctacaccctatcctacactctttccctacacgacgctcttccgatcttgaacagcatgaaaacaagtagtataggc

SEQ ID NO: 4429 - DNA, 95 bp, Artificial Sequence
  Description of Artificial Sequence: Synthetic primer
aatgatacggcgaccaccgagatctacaccctatcctacactctttccctacacgacgctcttccgatctcaccaactgtgcaagaatatgatgc

SEQ ID NO: 4430 - DNA, 98 bp, Artificial Sequence
  Description of Artificial Sequence: Synthetic primer
aatgatacggcgaccaccgagatctacaccctatcctacactctttccctacacgacgctcttccgatctcaccaactgtctgctaaagctcacttat

SEQ ID NO: 4431 - DNA, 98 bp, Artificial Sequence
  Description of Artificial Sequence: Synthetic primer
aatgatacggcgaccaccgagatctacaccctatcctacactctttccctacacgacgctcttccgatctcattgaggcatgatagactacattcctg

SEQ ID NO: 4432 - DNA, 101 bp, Artificial Sequence
  Description of Artificial Sequence: Synthetic polynucleotide
aatgatacggcgaccaccgagatctacaccctatcctacactctttccctacacgacgctcttccgatcttagaatgaaacaaggattcacctttaacctg

SEQ ID NO: 4433 - DNA, 100 bp, Artificial Sequence
  Description of Artificial Sequence: Synthetic polynucleotide
aatgatacggcgaccaccgagatctacaccctatcctacactctttccctacacgacgctcttccgatctcccagccactattactttttcttgaaaaaa

SEQ ID NO: 4434 - DNA, 99 bp, Artificial Sequence
  Description of Artificial Sequence: Synthetic primer
aatgatacggcgaccaccgagatctacaccctatcctacactctttccctacacgacgctcttccgatctattcaacagggcctttctatttaggtaag

SEQ ID NO: 4435 - DNA, 102 bp, Artificial Sequence
  Description of Artificial Sequence: Synthetic polynucleotide
aatgatacggcgaccaccgagatctacaccctatcctacactctttccctacacgacgctcttccgatcttttgtaatttgtgtccatttgctatttccctt

SEQ ID NO: 4436 - DNA, 89 bp, Artificial Sequence
  Description of Artificial Sequence: Synthetic primer
aatgatacggcgaccaccgagatctacaccctatcctacactctttccctacacgacgctcttccgatctggcatccacagggcagggt

SEQ ID NO: 4437 - DNA, 92 bp, Artificial Sequence
  Description of Artificial Sequence: Synthetic primer
aatgatacggcgaccaccgagatctacaccctatcctacactctttccctacacgacgctcttccgatcttaaacagagggctcagcccagc

SEQ ID NO: 4438 - DNA, 96 bp, Artificial Sequence
  Description of Artificial Sequence: Synthetic primer
aatgatacggcgaccaccgagatctacaccctatcctacactctttccctacacgacgctcttccgatctaccaagagaaggtttcaatgacggtg

SEQ ID NO: 4439 - DNA, 89 bp, Artificial Sequence
  Description of Artificial Sequence: Synthetic primer
aatgatacggcgaccaccgagatctacaccctatcctacactctttccctacacgacgctcttccgatctgaagaggcagcagggaggg

SEQ ID NO: 4440 - DNA, 95 bp, Artificial Sequence
  Description of Artificial Sequence: Synthetic primer
aatgatacggcgaccaccgagatctacaccctatcctacactctttccctacacgacgctcttccgatctccctcatcagcatcaccttctaggg

SEQ ID NO: 4441 - DNA, 99 bp, Artificial Sequence
  Description of Artificial Sequence: Synthetic primer
aatgatacggcgaccaccgagatctacaccctatcctacactctttccctacacgacgctcttccgatctaccaaaatgagaaaactgtgtttctccct

SEQ ID NO: 4442 - DNA, 92 bp, Artificial Sequence
  Description of Artificial Sequence: Synthetic primer
aatgatacggcgaccaccgagatctacaccctatcctacactctttccctacacgacgctcttccgatctaggcacataccaggcagtcaga

SEQ ID NO: 4443 - DNA, 99 bp, Artificial Sequence; identical to SEQ ID NO: 4441
  Description of Artificial Sequence: Synthetic primer

SEQ ID NO: 4444 - DNA, 92 bp, Artificial Sequence
  Description of Artificial Sequence: Synthetic primer
aatgatacggcgaccaccgagatctacaccctatcctacactctttccctacacgacgctcttccgatctggaaggataggacagggtgggc

SEQ ID NO: 4445 - DNA, 92 bp, Artificial Sequence
  Description of Artificial Sequence: Synthetic primer
aatgatacggcgaccaccgagatctacaccctatcctacactctttccctacacgacgctcttccgatcttcctcaggactctgtctgccct

SEQ ID NO: 4446 - DNA, 96 bp, Artificial Sequence
  Description of Artificial Sequence: Synthetic primer
aatgatacggcgaccaccgagatctacaccctatcctacactctttccctacacgacgctcttccgatcttgtgatctcttccagagtctcaaaca

SEQ ID NO: 4447 - DNA, 90 bp, Artificial Sequence
  Description of Artificial Sequence: Synthetic primer
aatgatacggcgaccaccgagatctacaccctatcctacactctttccctacacgacgctcttccgatctactcctccctgggactcctc

SEQ ID NO: 4448 - DNA, 91 bp, Artificial Sequence
  Description of Artificial Sequence: Synthetic primer
aatgatacggcgaccaccgagatctacaccctatcctacactctttccctacacgacgctcttccgatctgaagacgctgaggtcaggcag

SEQ ID NO: 4449 - DNA, 92 bp, Artificial Sequence
  Description of Artificial Sequence: Synthetic primer
aatgatacggcgaccaccgagatctacaccctatcctacactctttccctacacgacgctcttccgatctcactgctgtgtgctggcagatg

SEQ ID NO: 4450 - DNA, 90 bp, Artificial Sequence
  Description of Artificial Sequence: Synthetic primer
aatgatacggcgaccaccgagatctacaccctatcctacactctttccctacacgacgctcttccgatctgactcctccctgggactcct

SEQ ID NO: 4451 - DNA, 92 bp, Artificial Sequence; identical to SEQ ID NO: 4449
  Description of Artificial Sequence: Synthetic primer

SEQ ID NO: 4452 - DNA, 91 bp, Artificial Sequence
  Description of Artificial Sequence: Synthetic primer
aatgatacggcgaccaccgagatctacaccctatcctacactctttccctacacgacgctcttccgatctggcattcctccacgcactcct

SEQ ID NO: 4453 - DNA, 90 bp, Artificial Sequence
  Description of Artificial Sequence: Synthetic primer
aatgatacggcgaccaccgagatctacaccctatcctacactctttccctacacgacgctcttccgatctcctccacccagctctgagcc

SEQ ID NO: 4454 - DNA, 92 bp, Artificial Sequence
  Description of Artificial Sequence: Synthetic primer
aatgatacggcgaccaccgagatctacaccctatcctacactctttccctacacgacgctcttccgatcttgcagaaaagaccgttggactc

SEQ ID NO: 4455 - DNA, 92 bp, Artificial Sequence
  Description of Artificial Sequence: Synthetic primer
aatgatacggcgaccaccgagatctacaccctatcctacactctttccctacacgacgctcttccgatctggagtgaagggcaatgaagggt

SEQ ID NO: 4456 - DNA, 89 bp, Artificial Sequence
  Description of Artificial Sequence: Synthetic primer
aatgatacggcgaccaccgagatctacaccctatcctacactctttccctacacgacgctcttccgatctgctaggtgtcagcggctcc

SEQ ID NO: 4457 - DNA, 92 bp, Artificial Sequence
  Description of Artificial Sequence: Synthetic primer
aatgatacggcgaccaccgagatctacaccctatcctacactctttccctacacgacgctcttccgatctcctcctagcaggagagggtgga

SEQ ID NO: 4458 - DNA, 92 bp, Artificial Sequence
  Description of Artificial Sequence: Synthetic primer
aatgatacggcgaccaccgagatctacaccctatcctacactctttccctacacgacgctcttccgatcttgccaaaagcgccagatccaag

SEQ ID NO: 4459 - DNA, 92 bp, Artificial Sequence; identical to SEQ ID NO: 4457
  Description of Artificial Sequence: Synthetic primer

SEQ ID NO: 4460 - DNA, 94 bp, Artificial Sequence
  Description of Artificial Sequence: Synthetic primer
aatgatacggcgaccaccgagatctacaccctatcctacactctttccctacacgacgctcttccgatcttgcataccttggcaatctgcatac

SEQ ID NO: 4461 - DNA, 92 bp, Artificial Sequence
  Description of Artificial Sequence: Synthetic primer
aatgatacggcgaccaccgagatctacaccctatcctacactctttccctacacgacgctcttccgatctcctctgctccttggtccttcac

SEQ ID NO: 4462 - DNA, 91 bp, Artificial Sequence
  Description of Artificial Sequence: Synthetic primer
aatgatacggcgaccaccgagatctacaccctatcctacactctttccctacacgacgctcttccgatctctgcaaagagcccaggtgcat

SEQ ID NO: 4463 - DNA, 89 bp, Artificial Sequence
  Description of Artificial Sequence: Synthetic primer
aatgatacggcgaccaccgagatctacaccctatcctacactctttccctacacgacgctcttccgatctcatggctcctcacccaccc

SEQ ID NO: 4464 - DNA, 90 bp, Artificial Sequence
  Description of Artificial Sequence: Synthetic primer
aatgatacggcgaccaccgagatctacaccctatcctacactctttccctacacgacgctcttccgatctacctcccaccctcctccagg

SEQ ID NO: 4465 - DNA, 92 bp, Artificial Sequence
  Description of Artificial Sequence: Synthetic primer
aatgatacggcgaccaccgagatctacaccctatcctacactctttccctacacgacgctcttccgatctctcttagccacaggcagggatg

SEQ ID NO: 4466 - DNA, 89 bp, Artificial Sequence
  Description of Artificial Sequence: Synthetic primer
aatgatacggcgaccaccgagatctacaccctatcctacactctttccctacacgacgctcttccgatctacacagtgtgaccgagggc

SEQ ID NO: 4467 - DNA, 94 bp, Artificial Sequence
  Description of Artificial Sequence: Synthetic primer
aatgatacggcgaccaccgagatctacaccctatcctacactctttccctacacgacgctcttccgatctgactcatctctccttcccaccctc

SEQ ID NO: 4468 - DNA, 92 bp, Artificial Sequence
  Description of Artificial Sequence: Synthetic primer
aatgatacggcgaccaccgagatctacaccctatcctacactctttccctacacgacgctcttccgatctggtatgacacagtcaccgtgga

SEQ ID NO: 4469 - DNA, 89 bp, Artificial Sequence
  Description of Artificial Sequence: Synthetic primer
aatgatacggcgaccaccgagatctacaccctatcctacactctttccctacacgacgctcttccgatctacagtggaccctgggctga

SEQ ID NO: 4470 - DNA, 91 bp, Artificial Sequence
  Description of Artificial Sequence: Synthetic primer
aatgatacggcgaccaccgagatctacaccctatcctacactctttccctacacgacgctcttccgatctttctgcggacttggccttctg

SEQ ID NO: 4471 - DNA, 89 bp, Artificial Sequence
  Description of Artificial Sequence: Synthetic primer
aatgatacggcgaccaccgagatctacaccctatcctacactctttccctacacgacgctcttccgatctgacaggcagggcaggcaca

SEQ ID NO: 4472 - DNA, 90 bp, Artificial Sequence
  Description of Artificial Sequence: Synthetic primer
aatgatacggcgaccaccgagatctacaccctatcctacactctttccctacacgacgctcttccgatcttcaccaccaagcccacagct

SEQ ID NO: 4473 - DNA, 90 bp, Artificial Sequence
  Description of Artificial Sequence: Synthetic primer
aatgatacggcgaccaccgagatctacaccctatcctacactctttccctacacgacgctcttccgatctccttcccgaagggtcccagg

SEQ ID NO: 4474 - DNA, 92 bp, Artificial Sequence
  Description of Artificial Sequence: Synthetic primer
aatgatacggcgaccaccgagatctacaccctatcctacactctttccctacacgacgctcttccgatctgggcaaatgagcctctcagtgc

SEQ ID NO: 4475 - DNA, 89 bp, Artificial Sequence
  Description of Artificial Sequence: Synthetic primer
aatgatacggcgaccaccgagatctacaccctatcctacactctttccctacacgacgctcttccgatctggacccaggcttggcaggt

SEQ ID NO: 4476 - DNA, 90 bp, Artificial Sequence
  Description of Artificial Sequence: Synthetic primer
aatgatacggcgaccaccgagatctacaccctatcctacactctttccctacacgacgctcttccgatctagctcccggcctgtatgagc

SEQ ID NO: 4477 - DNA, 90 bp, Artificial Sequence
  Description of Artificial Sequence: Synthetic primer
aatgatacggcgaccaccgagatctacaccctatcctacactctttccctacacgacgctcttccgatctcccgtgtctccatcccgtct

SEQ ID NO: 4478 - DNA, 95 bp, Artificial Sequence
  Description of Artificial Sequence: Synthetic primer
aatgatacggcgaccaccgagatctacaccctatcctacactctttccctacacgacgctcttccgatctctctccctttcctctgttctctgca

SEQ ID NO: 4479 - DNA, 90 bp, Artificial Sequence
  Description of Artificial Sequence: Synthetic primer
aatgatacggcgaccaccgagatctacaccctatcctacactctttccctacacgacgctcttccgatctttctgcccacagcggtttgc

SEQ ID NO: 4480 - DNA, 92 bp, Artificial Sequence
  Description of Artificial Sequence: Synthetic primer
aatgatacggcgaccaccgagatctacaccctatcctacactctttccctacacgacgctcttccgatctaggatcaagggaggagtggctc

SEQ ID NO: 4481 - DNA, 92 bp, Artificial Sequence
  Description of Artificial Sequence: Synthetic primer
aatgatacggcgaccaccgagatctacaccctatcctacactctttccctacacgacgctcttccgatctttcccgttcatttcccaggtgg

SEQ ID NO: 4482 - DNA, 89 bp, Artificial Sequence
  Description of Artificial Sequence: Synthetic primer
aatgatacggcgaccaccgagatctacaccctatcctacactctttccctacacgacgctcttccgatcttgtcccaccagccacactt

SEQ ID NO: 4483 - DNA, 88 bp, Artificial Sequence
  Description of Artificial Sequence: Synthetic primer
aatgatacggcgaccaccgagatctacaccctatcctacactctttccctacacgacgctcttccgatctgtgccctgaacccaccct

SEQ ID NO: 4484 - DNA, 92 bp, Artificial Sequence
  Description of Artificial Sequence: Synthetic primer
aatgatacggcgaccaccgagatctacaccctatcctacactctttccctacacgacgctcttccgatctaggagtgacctaacttgcgtct

SEQ ID NO: 4485 - DNA, 88 bp, Artificial Sequence; identical to SEQ ID NO: 4483
  Description of Artificial Sequence: Synthetic primer

SEQ ID NO: 4486 - DNA, 93 bp, Artificial Sequence
  Description of Artificial Sequence: Synthetic primer
aatgatacggcgaccaccgagatctacaccctatcctacactctttccctacacgacgctcttccgatctgacagagaagggaggaggacctg

SEQ ID NO: 4487 - DNA, 90 bp, Artificial Sequence
  Description of Artificial Sequence: Synthetic primer
aatgatacggcgaccaccgagatctacaccctatcctacactctttccctacacgacgctcttccgatctagttgctgctgcctcgctta

SEQ ID NO: 4488 - DNA, 92 bp, Artificial Sequence
  Description of Artificial Sequence: Synthetic primer
aatgatacggcgaccaccgagatctacaccctatcctacactctttccctacacgacgctcttccgatctagtcctgctgagatccctccca

SEQ ID NO: 4489 - DNA, 90 bp, Artificial Sequence
  Description of Artificial Sequence: Synthetic primer
aatgatacggcgaccaccgagatctacaccctatcctacactctttccctacacgacgctcttccgatctccctccttgcctgccctctg

SEQ ID NO: 4490 - DNA, 104 bp, Artificial Sequence
  Description of Artificial Sequence: Synthetic polynucleotide
aatgatacggcgaccaccgagatctacaccctatcctacactctttccctacacgacgctcttccgatctcactgtgtgaaaccgaatatgtaaattcattcat

SEQ ID NO: 4491 - DNA, 91 bp, Artificial Sequence
  Description of Artificial Sequence: Synthetic primer
aatgatacggcgaccaccgagatctacaccctatcctacactctttccctacacgacgctcttccgatctctgctggtcctgctcatgctt

SEQ ID NO: 4492 - DNA, 89 bp, Artificial Sequence
  Description of Artificial Sequence: Synthetic primer
aatgatacggcgaccaccgagatctacaccctatcctacactctttccctacacgacgctcttccgatctcagtccctttcccgcctcc

SEQ ID NO: 4493 - DNA, 89 bp, Artificial Sequence
  Description of Artificial Sequence: Synthetic primer
aatgatacggcgaccaccgagatctacaccctatcctacactctttccctacacgacgctcttccgatctgggccaaagggatgccagc

SEQ ID NO: 4494 - DNA, 88 bp, Artificial Sequence
  Description of Artificial Sequence: Synthetic primer
aatgatacggcgaccaccgagatctacaccctatcctacactctttccctacacgacgctcttccgatcttgctgcccgacgaagtgc

SEQ ID NO: 4495 - DNA, 90 bp, Artificial Sequence
  Description of Artificial Sequence: Synthetic primer
aatgatacggcgaccaccgagatctacaccctatcctacactctttccctacacgacgctcttccgatctgccctggtaaccctgctccc

SEQ ID NO: 4496 - DNA, 93 bp, Artificial Sequence
  Description of Artificial Sequence: Synthetic primer
aatgatacggcgaccaccgagatctacaccctatcctacactctttccctacacgacgctcttccgatctcagacaacgtctgcatcgactcc

SEQ ID NO: 4497 - DNA, 92 bp, Artificial Sequence
  Description of Artificial Sequence: Synthetic primer
aatgatacggcgaccaccgagatctacaccctatcctacactctttccctacacgacgctcttccgatcttctgcctgtctgcatctccctg

SEQ ID NO: 4498 - DNA, 91 bp, Artificial Sequence
  Description of Artificial Sequence: Synthetic primer
aatgatacggcgaccaccgagatctacaccctatcctacactctttccctacacgacgctcttccgatcttgtctgggtgctaagatgccc

SEQ ID NO: 4499 - DNA, 95 bp, Artificial Sequence
  Description of Artificial Sequence: Synthetic primer
aatgatacggcgaccaccgagatctacaccctatcctacactctttccctacacgacgctcttccgatctttggagtaggtgattgaagagcttc

SEQ ID NO: 4500 - DNA, 92 bp, Artificial Sequence
  Description of Artificial Sequence: Synthetic primer
aatgatacggcgaccaccgagatctacaccctatcctacactctttccctacacgacgctcttccgatctcagggactgagtccgcttgtta

SEQ ID NO: 4501 - DNA, 91 bp, Artificial Sequence
  Description of Artificial Sequence: Synthetic primer
aatgatacggcgaccaccgagatctacaccctatcctacactctttccctacacgacgctcttccgatctctccaatgagcacaagctccc

SEQ ID NO: 4502 - DNA, 92 bp, Artificial Sequence
  Description of Artificial Sequence: Synthetic primer
aatgatacggcgaccaccgagatctacaccctatcctacactctttccctacacgacgctcttccgatctgtttgtgtgcccaaggttctga

SEQ ID NO: 4503 - DNA, 89 bp, Artificial Sequence
  Description of Artificial Sequence: Synthetic primer
aatgatacggcgaccaccgagatctacaccctatcctacactctttccctacacgacgctcttccgatctacgggaactgacccagcag

SEQ ID NO: 4504 - DNA, 88 bp, Artificial Sequence
  Description of Artificial Sequence: Synthetic primer
aatgatacggcgaccaccgagatctacaccctatcctacactctttccctacacgacgctcttccgatctatgagggaggcgggtcga

SEQ ID NO: 4505 - DNA, 102 bp, Artificial Sequence
  Description of Artificial Sequence: Synthetic polynucleotide
aatgatacggcgaccaccgagatctacaccctatcctacactctttccctacacgacgctcttccgatcttataaaaggagtatcttttcttctggagacta

SEQ ID NO: 4506 - DNA, 89 bp, Artificial Sequence
  Description of Artificial Sequence: Synthetic primer
aatgatacggcgaccaccgagatctacaccctatcctacactctttccctacacgacgctcttccgatctgctggcttgggctttgcag

SEQ ID NO: 4507 - DNA, 98 bp, Artificial Sequence
  Description of Artificial Sequence: Synthetic primer
aatgatacggcgaccaccgagatctacaccctatcctacactctttccctacacgacgctcttccgatcttctttattgccgtttctcattttttcct

SEQ ID NO: 4508 - DNA, 101 bp, Artificial Sequence
  Description of Artificial Sequence: Synthetic polynucleotide
aatgatacggcgaccaccgagatctacaccctatcctacactctttccctacacgacgctcttccgatcttctggatcagttgactttttttttttcctca

SEQ ID NO: 4509 - DNA, 100 bp, Artificial Sequence
  Description of Artificial Sequence: Synthetic polynucleotide
aatgatacggcgaccaccgagatctacaccctatcctacactctttccctacacgacgctcttccgatcttttcaagataactgaggcattattctgtgg

SEQ ID NO: 4510 - DNA, 102 bp, Artificial Sequence
  Description of Artificial Sequence: Synthetic polynucleotide
aatgatacggcgaccaccgagatctacaccctatcctacactctttccctacacgacgctcttccgatcttaattctgctagagaaaggtcttcaaaagttt

SEQ ID NO: 4511 - DNA, 91 bp, Artificial Sequence
  Description of Artificial Sequence: Synthetic primer
aatgatacggcgaccaccgagatctacaccctatcctacactctttccctacacgacgctcttccgatcttgctcccattgtttcctcagc

SEQ ID NO: 4512 - DNA, 90 bp, Artificial Sequence
  Description of Artificial Sequence: Synthetic primer
aatgatacggcgaccaccgagatctacaccctatcctacactctttccctacacgacgctcttccgatctcaaaaggtcctgggaggccg

SEQ ID NO: 4513 - DNA, 95 bp, Artificial Sequence
  Description of Artificial Sequence: Synthetic primer
aatgatacggcgaccaccgagatctacaccctatcctacactctttccctacacgacgctcttccgatctgggattgcactcttgtttcttgtag

SEQ ID NO: 4514 - DNA, 101 bp, Artificial Sequence
  Description of Artificial Sequence: Synthetic polynucleotide
aatgatacggcgaccaccgagatctacaccctatcctacactctttccctacacgacgctcttccgatctcttagaagatgtaatgtttttgagcacagta

SEQ ID NO: 4515 - DNA, 94 bp, Artificial Sequence
  Description of Artificial Sequence: Synthetic primer
aatgatacggcgaccaccgagatctacaccctatcctacactctttccctacacgacgctcttccgatctacgttcagcacctacctctctcac

SEQ ID NO: 4516 - DNA, 92 bp, Artificial Sequence
  Description of Artificial Sequence: Synthetic primer
aatgatacggcgaccaccgagatctacaccctatcctacactctttccctacacgacgctcttccgatctggtacctgctggtcagtagacc

SEQ ID NO: 4517 - DNA, 99 bp, Artificial Sequence
  Description of Artificial Sequence: Synthetic primer
aatgatacggcgaccaccgagatctacaccctatcctacactctttccctacacgacgctcttccgatcttgaccagtaatgaatgtgttctgagttag

SEQ ID NO: 4518 - DNA, 94 bp, Artificial Sequence
  Description of Artificial Sequence: Synthetic primer
aatgatacggcgaccaccgagatctacaccctatcctacactctttccctacacgacgctcttccgatctctgcaaaccagtgacatcaccgag

SEQ ID NO: 4519 - DNA, 96 bp, Artificial Sequence
  Description of Artificial Sequence: Synthetic primer
aatgatacggcgaccaccgagatctacaccctatcctacactctttccctacacgacgctcttccgatctcccagtagtctctgcaactcatgttt

SEQ ID NO: 4520 - DNA, 96 bp, Artificial Sequence
  Description of Artificial Sequence: Synthetic primer
aatgatacggcgaccaccgagatctacaccctatcctacactctttccctacacgacgctcttccgatctgcttacttctgtgttggtatcttgca

SEQ ID NO: 4521 - DNA, 94 bp, Artificial Sequence
  Description of Artificial Sequence: Synthetic primer
aatgatacggcgaccaccgagatctacaccctatcctacactctttccctacacgacgctcttccgatcttcatcttctctctgctgctgtagc

SEQ ID NO: 4522 - DNA, 91 bp, Artificial Sequence
  Description of Artificial Sequence: Synthetic primer
aatgatacggcgaccaccgagatctacaccctatcctacactctttccctacacgacgctcttccgatctccaacgcggcgttaaggatac

SEQ ID NO: 4523 - DNA, 101 bp, Artificial Sequence
  Description of Artificial Sequence: Synthetic polynucleotide
aatgatacggcgaccaccgagatctacaccctatcctacactctttccctacacgacgctcttccgatcttgacacttactaaaaactatacgacacttac

SEQ ID NO: 4524 - DNA, 105 bp, Artificial Sequence
  Description of Artificial Sequence: Synthetic polynucleotide
aatgatacggcgaccaccgagatctacaccctatcctacactctttccctacacgacgctcttccgatctaaacttcatctctaacacgactataattttcctct

SEQ ID NO: 4525 - DNA, 99 bp, Artificial Sequence
  Description of Artificial Sequence: Synthetic primer
aatgatacggcgaccaccgagatctacaccctatcctacactctttccctacacgacgctcttccgatcttgtgtctgaatgtagcaatgactaaaata

SEQ ID NO: 4526 - DNA, 105 bp, Artificial Sequence
  Description of Artificial Sequence: Synthetic polynucleotide
aatgatacggcgaccaccgagatctacaccctatcctacactctttccctacacgacgctcttccgatctatcaggaactttcacagtttgatatacctcattaa

SEQ ID NO: 4527 - DNA, 101 bp, Artificial Sequence
  Description of Artificial Sequence: Synthetic polynucleotide
aatgatacggcgaccaccgagatctacaccctatcctacactctttccctacacgacgctcttccgatctaactcttcctgtaaagataaaatcacagcac

SEQ ID NO: 4528 - DNA, 100 bp, Artificial Sequence
  Description of Artificial Sequence: Synthetic polynucleotide
aatgatacggcgaccaccgagatctacaccctatcctacactctttccctacacgacgctcttccgatctttgctgaagttcttaattctaagcatgaat

SEQ ID NO: 4529 - DNA, 102 bp, Artificial Sequence
  Description of Artificial Sequence: Synthetic polynucleotide
aatgatacggcgaccaccgagatctacaccctatcctacactctttccctacacgacgctcttccgatctcatgttctatatgctggttcagatagttcttt

SEQ ID NO: 4530 - DNA, 99 bp, Artificial Sequence
  Description of Artificial Sequence: Synthetic primer
aatgatacggcgaccaccgagatctacaccctatcctacactctttccctacacgacgctcttccgatctaatcggcaactaggagttaattcattagc

SEQ ID NO: 4531 - DNA, 89 bp, Artificial Sequence
  Description of Artificial Sequence: Synthetic primer
aatgatacggcgaccaccgagatctacaccctatcctacactctttccctacacgacgctcttccgatctccacgggcctgccttcgat

SEQ ID NO: 4532 - DNA, 94 bp, Artificial Sequence
  Description of Artificial Sequence: Synthetic primer
aatgatacggcgaccaccgagatctacaccctatcctacactctttccctacacgacgctcttccgatctgcccaggtgcgtcactatgtctaa

SEQ ID NO: 4533 - DNA, 95 bp, Artificial Sequence
  Description of Artificial Sequence: Synthetic primer
aatgatacggcgaccaccgagatctacaccctatcctacactctttccctacacgacgctcttccgatctccgttccagatttctacaaaagcac

SEQ ID NO: 4534 - DNA, 95 bp, Artificial Sequence
  Description of Artificial Sequence: Synthetic primer
aatgatacggcgaccaccgagatctacaccctatcctacactctttccctacacgacgctcttccgatctttctgagggaggtttggaagtttca

SEQ ID NO: 4535 - DNA, 101 bp, Artificial Sequence
  Description of Artificial Sequence: Synthetic polynucleotide
aatgatacggcgaccaccgagatctacaccctatcctacactctttccctacacgacgctcttccgatctcaagaagtcgaaacacaatgttacggtatta

SEQ ID NO: 4536 - DNA, 97 bp, Artificial Sequence
  Description of Artificial Sequence: Synthetic primer
aatgatacggcgaccaccgagatctacaccctatcctacactctttccctacacgacgctcttccgatctgtctgaagaaggtggtaaaggaaaccc

SEQ ID NO: 4537 - DNA, 98 bp, Artificial Sequence
  Description of Artificial Sequence: Synthetic primer
aatgatacggcgaccaccgagatctacaccctatcctacactctttccctacacgacgctcttccgatctaggacaaactctgaaggtaaatgtcaga

SEQ ID NO: 4538 - DNA, 103 bp, Artificial Sequence
  Description of Artificial Sequence: Synthetic polynucleotide
aatgatacggcgaccaccgagatctacaccctatcctacactctttccctacacgacgctcttccgatctgctgtaaataatagttctatttgcttatttggg

SEQ ID NO: 4539 - DNA, 99 bp, Artificial Sequence
  Description of Artificial Sequence: Synthetic primer
aatgatacggcgaccaccgagatctacaccctatcctacactctttccctacacgacgctcttccgatctcaaggtgtttccttctcttttaagaagca

SEQ ID NO: 4540 - DNA, 96 bp, Artificial Sequence
  Description of Artificial Sequence: Synthetic primer
aatgatacggcgaccaccgagatctacaccctatcctacactctttccctacacgacgctcttccgatctaacttaggagaagggtccaccatgat

SEQ ID NO: 4541 - DNA, 99 bp, Artificial Sequence
  Description of Artificial Sequence: Synthetic primer
aatgatacggcgaccaccgagatctacaccctatcctacactctttccctacacgacgctcttccgatctgggtttttccttttgccttatcaagtagc

SEQ ID NO: 4542 - DNA, 99 bp, Artificial Sequence
  Description of Artificial Sequence: Synthetic primer
aatgatacggcgaccaccgagatctacaccctatcctacactctttccctacacgacgctcttccgatctcgtctttgcgacaaattcattacaaatgg

SEQ ID NO: 4543 - DNA, 90 bp, Artificial Sequence
  Description of Artificial Sequence: Synthetic primer
aatgatacggcgaccaccgagatctacaccctatcctacactctttccctacacgacgctcttccgatctttcatcgctttccaggccca

SEQ ID NO: 4544 - DNA, 94 bp, Artificial Sequence
  Description of Artificial Sequence: Synthetic primer
aatgatacggcgaccaccgagatctacaccctatcctacactctttccctacacgacgctcttccgatctgtcttgtgacccttcacagccttt

SEQ ID NO: 4545 - DNA, 102 bp, Artificial Sequence
  Description of Artificial Sequence: Synthetic polynucleotide
aatgatacggcgaccaccgagatctacaccctatcctacactctttccctacacgacgctcttccgatctgtctcaaaagcaaacatttaatctactgtgat

SEQ ID NO: 4546 - DNA, 103 bp, Artificial Sequence
  Description of Artificial Sequence: Synthetic polynucleotide
aatgatacggcgaccaccgagatctacaccctatcctacactctttccctacacgacgctcttccgatctgcatacagagtgaaatatcactttgctatttct

SEQ ID NO: 4547 - DNA, 95 bp, Artificial Sequence
  Description of Artificial Sequence: Synthetic primer
aatgatacggcgaccaccgagatctacaccctatcctacactctttccctacacgacgctcttccgatctaaacatctgagaccaaagcaaaagc

SEQ ID NO: 4548 - DNA, 101 bp, Artificial Sequence
  Description of Artificial Sequence: Synthetic polynucleotide
aatgatacggcgaccaccgagatctacaccctatcctacactctttccctacacgacgctcttccgatctcttctaacatatctgtaaatgatgccacatc

SEQ ID NO: 4549 - DNA, 100 bp, Artificial Sequence
  Description of Artificial Sequence: Synthetic polynucleotide
aatgatacggcgaccaccgagatctacaccctatcctacactctttccctacacgacgctcttccgatctgtagagctacacattgttttataccagctt

SEQ ID NO: 4550 - DNA, 93 bp, Artificial Sequence
  Description of Artificial Sequence: Synthetic primer
aatgatacggcgaccaccgagatctacaccctatcctacactctttccctacacgacgctcttccgatcttgggaaggattctcgttgagagg

SEQ ID NO: 4551 - DNA, 94 bp, Artificial Sequence
  Description of Artificial Sequence: Synthetic primer
aatgatacggcgaccaccgagatctacaccctatcctacactctttccctacacgacgctcttccgatctgtgtgctcagtgttgtgtgtctta

SEQ ID NO: 4552 - DNA, 95 bp, Artificial Sequence
  Description of Artificial Sequence: Synthetic primer
aatgatacggcgaccaccgagatctacaccctatcctacactctttccctacacgacgctcttccgatctgcactcactgggaatgtgtatttgc

SEQ ID NO: 4553 - DNA, 100 bp, Artificial Sequence
  Description of Artificial Sequence: Synthetic polynucleotide
aatgatacggcgaccaccgagatctacaccctatcctacactctttccctacacgacgctcttccgatcttgatgaactagaagaagatcagtttgggta

SEQ ID NO: 4554 - DNA, 94 bp, Artificial Sequence
  Description of Artificial Sequence: Synthetic primer
aatgatacggcgaccaccgagatctacaccctatcctacactctttccctacacgacgctcttccgatcttaggttaaacagcctccttgccta

SEQ ID NO: 4555 - DNA, 101 bp, Artificial Sequence
  Description of Artificial Sequence: Synthetic polynucleotide
aatgatacggcgaccaccgagatctacaccctatcctacactctttccctacacgacgctcttccgatctttgaaattatagtttccttgtttttcccgtc

SEQ ID NO: 4556 - DNA, 98 bp, Artificial Sequence
  Description of Artificial Sequence: Synthetic primer
aatgatacggcgaccaccgagatctacaccctatcctacactctttccctacacgacgctcttccgatctaggtaagaacaaatgcgttccttaaaca

SEQ ID NO: 4557 - DNA, 99 bp, Artificial Sequence
  Description of Artificial Sequence: Synthetic primer
aatgatacggcgaccaccgagatctacaccctatcctacactctttccctacacgacgctcttccgatcttttagggtaggaatggcgattgctaaaag

SEQ ID NO: 4558 - DNA, 100 bp, Artificial Sequence
  Description of Artificial Sequence: Synthetic polynucleotide
aatgatacggcgaccaccgagatctacaccctatcctacactctttccctacacgacgctcttccgatctaaaactgactttaccattttattgtggtct

SEQ ID NO: 4559 - DNA, 95 bp, Artificial Sequence
  Description of Artificial Sequence: Synthetic primer
aatgatacggcgaccaccgagatctacaccctatcctacactctttccctacacgacgctcttccgatcttgagcagttgatgactgtatatgct

SEQ ID NO: 4560 - DNA, 103 bp, Artificial Sequence
  Description of Artificial Sequence: Synthetic polynucleotide
aatgatacggcgaccaccgagatctacaccctatcctacactctttccctacacgacgctcttccgatctattttctcttttcttgttggtgtttgttgtcat

SEQ ID NO: 4561 - DNA, 100 bp, Artificial Sequence
  Description of Artificial Sequence: Synthetic polynucleotide
aatgatacggcgaccaccgagatctacaccctatcctacactctttccctacacgacgctcttccgatcttggaaatgtgatttttattttcatggtagg

SEQ ID NO: 4562 - DNA, 95 bp, Artificial Sequence
  Description of Artificial Sequence: Synthetic primer
aatgatacggcgaccaccgagatctacaccctatcctacactctttccctacacgacgctcttccgatctggacctgtctggagatggtactgac

SEQ ID NO: 4563 - DNA, 96 bp, Artificial Sequence
  Description of Artificial Sequence: Synthetic primer
aatgatacggcgaccaccgagatctacaccctatcctacactctttccctacacgacgctcttccgatctctagtgcgaaacgcattgctattgtt

SEQ ID NO: 4564 - DNA, 100 bp, Artificial Sequence
  Description of Artificial Sequence: Synthetic polynucleotide
aatgatacggcgaccaccgagatctacaccctatcctacactctttccctacacgacgctcttccgatcttcacttcattgctgttttctgtcttctata

SEQ ID NO: 4565 - DNA, 103 bp, Artificial Sequence
  Description of Artificial Sequence: Synthetic polynucleotide
aatgatacggcgaccaccgagatctacaccctatcctacactctttccctacacgacgctcttccgatctgctataaaaatgttatcagagtgcaaaatagac

SEQ ID NO: 4566 - DNA, 92 bp, Artificial Sequence
  Description of Artificial Sequence: Synthetic primer
aatgatacggcgaccaccgagatctacaccctatcctacactctttccctacacgacgctcttccgatctccgacatcagatccaggcagta

SEQ ID NO: 4567 - DNA, 101 bp, Artificial Sequence
  Description of Artificial Sequence: Synthetic polynucleotide
aatgatacggcgaccaccgagatctacaccctatcctacactctttccctacacgacgctcttccgatcttgatcttttgagaaatcagtctgctctaatt

SEQ ID NO: 4568 - DNA, 89 bp, Artificial Sequence
  Description of Artificial Sequence: Synthetic primer
aatgatacggcgaccaccgagatctacaccctatcctacactctttccctacacgacgctcttccgatcttgtacacggcgggcttgct

SEQ ID NO: 4569 - DNA, 91 bp, Artificial Sequence
  Description of Artificial Sequence: Synthetic primer
aatgatacggcgaccaccgagatctacaccctatcctacactctttccctacacgacgctcttccgatctcttctccctccctccctccct

SEQ ID NO: 4570 - DNA, 104 bp, Artificial Sequence
  Description of Artificial Sequence: Synthetic polynucleotide
aatgatacggcgaccaccgagatctacaccctatcctacactctttccctacacgacgctcttccgatctttaggatctgctcataggatcaaaaatagaagtc

SEQ ID NO: 4571 - DNA, 92 bp, Artificial Sequence
  Description of Artificial Sequence: Synthetic primer
aatgatacggcgaccaccgagatctacaccctatcctacactctttccctacacgacgctcttccgatctccctgggagagatgtacctacc

SEQ ID NO: 4572 - DNA, 93 bp, Artificial Sequence
  Description of Artificial Sequence: Synthetic primer
aatgatacggcgaccaccgagatctacaccctatcctacactctttccctacacgacgctcttccgatctctctctggcgcttgtgtttcaac

SEQ ID NO: 4573 - DNA, 100 bp, Artificial Sequence
  Description of Artificial Sequence: Synthetic polynucleotide
aatgatacggcgaccaccgagatctacaccctatcctacactctttccctacacgacgctcttccgatctttgaaaagctattgactcttaaaagctgcg

SEQ ID NO: 4574 - DNA, 94 bp, Artificial Sequence
  Description of Artificial Sequence: Synthetic primer
aatgatacggcgaccaccgagatctacaccctatcctacactctttccctacacgacgctcttccgatctcctaagctacagccaggtcactta

SEQ ID NO: 4575 - DNA, 104 bp, Artificial Sequence
  Description of Artificial Sequence: Synthetic polynucleotide
aatgatacggcgaccaccgagatctacaccctatcctacactctttccctacacgacgctcttccgatctataaacatttcatccagcattgagttatcttgtg

SEQ ID NO: 4576 - DNA, 98 bp, Artificial Sequence
  Description of Artificial Sequence: Synthetic primer
aatgatacggcgaccaccgagatctacaccctatcctacactctttccctacacgacgctcttccgatcttgttttctttatgtctctcctgtaggaa

SEQ ID NO: 4577 - DNA, 89 bp, Artificial Sequence
  Description of Artificial Sequence: Synthetic primer
aatgatacggcgaccaccgagatctacaccctatcctacactctttccctacacgacgctcttccgatcttctgaaccgtgtgggagcc

SEQ ID NO: 4578 - DNA, 94 bp, Artificial Sequence
  Description of Artificial Sequence: Synthetic primer
aatgatacggcgaccaccgagatctacaccctatcctacactctttccctacacgacgctcttccgatctagcggacatctccttcctgttgtt

SEQ ID NO: 4579 - DNA, 96 bp, Artificial Sequence
  Description of Artificial Sequence: Synthetic primer
aatgatacggcgaccaccgagatctacaccctatcctacactctttccctacacgacgctcttccgatctacaccagtgtgtctctttgcagttat

SEQ ID NO: 4580 - DNA, 99 bp, Artificial Sequence
  Description of Artificial Sequence: Synthetic primer
aatgatacggcgaccaccgagatctacaccctatcctacactctttccctacacgacgctcttccgatcttgggctgtgcttacttttttctttttaga

SEQ ID NO: 4581 - DNA, 101 bp, Artificial Sequence
  Description of Artificial Sequence: Synthetic polynucleotide
aatgatacggcgaccaccgagatctacaccctatcctacactctttccctacacgacgctcttccgatctcacctttatccaaaagaattttctcctgtgt

SEQ ID NO: 4582 - DNA, 99 bp, Artificial Sequence
  Description of Artificial Sequence: Synthetic primer
aatgatacggcgaccaccgagatctacaccctatcctacactctttccctacacgacgctcttccgatctcagtccattttcaccctccttttttgatg

SEQ ID NO: 4583 - DNA, 96 bp, Artificial Sequence
  Description of Artificial Sequence: Synthetic primer
aatgatacggcgaccaccgagatctacaccctatcctacactctttccctacacgacgctcttccgatcttttctgcaagtttttgcatacggtga

SEQ ID NO: 4584 - DNA, 98 bp, Artificial Sequence
  Description of Artificial Sequence: Synthetic primer
aatgatacggcgaccaccgagatctacaccctatcctacactctttccctacacgacgctcttccgatcttcattggcctgcatgatgttatctttac

SEQ ID NO: 4585 - DNA, 96 bp, Artificial Sequence
  Description of Artificial Sequence: Synthetic primer
aatgatacggcgaccaccgagatctacaccctatcctacactctttccctacacgacgctcttccgatctctctctgttggatttgtagcttcccg

SEQ ID NO: 4586 - DNA, 96 bp, Artificial Sequence
  Description of Artificial Sequence: Synthetic primer
aatgatacggcgaccaccgagatctacaccctatcctacactctttccctacacgacgctcttccgatctggtttgcctaaataagactgtcctca

SEQ ID NO: 4587 - DNA, 99 bp, Artificial Sequence
  Description of Artificial Sequence: Synthetic primer
aatgatacggcgaccaccgagatctacaccctatcctacactctttccctacacgacgctcttccgatctttcttgaccagtgcttacatttggttttg

SEQ ID NO: 4588 - DNA, 100 bp, Artificial Sequence
  Description of Artificial Sequence: Synthetic polynucleotide
aatgatacggcgaccaccgagatctacaccctatcctacactctttccctacacgacgctcttccgatctctttgccctgatgttgacatttttcatttc

SEQ ID NO: 4589 - DNA, 101 bp, Artificial Sequence
  Description of Artificial Sequence: Synthetic polynucleotide
aatgatacggcgaccaccgagatctacaccctatcctacactctttccctacacgacgctcttccgatctggaactggaagagtgaaaaagtaagtatttt

SEQ ID NO: 4590 - DNA, 101 bp, Artificial Sequence
  Description of Artificial Sequence: Synthetic polynucleotide
aatgatacggcgaccaccgagatctacaccctatcctacactctttccctacacgacgctcttccgatcttttaaatatgactgcttcctacatcgtaagt

SEQ ID NO: 4591 - DNA, 104 bp, Artificial Sequence
  Description of Artificial Sequence: Synthetic polynucleotide
aatgatacggcgaccaccgagatctacaccctatcctacactctttccctacacgacgctcttccgatctcaaaagtaacacatggaaaccttttagaaactgt

SEQ ID NO: 4592 - DNA, 101 bp, Artificial Sequence
  Description of Artificial Sequence: Synthetic polynucleotide
aatgatacggcgaccaccgagatctacaccctatcctacactctttccctacacgacgctcttccgatctcttccattctttttttcctttcatattctcc

SEQ ID NO: 4593 - DNA, 96 bp, Artificial Sequence
  Description of Artificial Sequence: Synthetic primer
aatgatacggcgaccaccgagatctacaccctatcctacactctttccctacacgacgctcttccgatctgcttctcctgtgtgtttctgacattt

SEQ ID NO: 4594 - DNA, 102 bp, Artificial Sequence
  Description of Artificial Sequence: Synthetic polynucleotide
aatgatacggcgaccaccgagatctacaccctatcctacactctttccctacacgacgctcttccgatcttcacatttgatacttagagtaaacctgctttt

SEQ ID NO: 4595 - DNA, 102 bp, Artificial Sequence
  Description of Artificial Sequence: Synthetic polynucleotide
aatgatacggcgaccaccgagatctacaccctatcctacactctttccctacacgacgctcttccgatctcatctctttacaatatgatggctacagcttaa

SEQ ID NO: 4596 - DNA, 98 bp, Artificial Sequence
  Description of Artificial Sequence: Synthetic primer
aatgatacggcgaccaccgagatctacaccctatcctacactctttccctacacgacgctcttccgatctcaatgaacaatttctcctttcctctcct

SEQ ID NO: 4597 - DNA, 98 bp, Artificial Sequence
  Description of Artificial Sequence: Synthetic primer
aatgatacggcgaccaccgagatctacaccctatcctacactctttccctacacgacgctcttccgatcttcatattcaggctggttagattagtgat

SEQ ID NO: 4598 - DNA, 104 bp, Artificial Sequence
  Description of Artificial Sequence: Synthetic polynucleotide
aatgatacggcgaccaccgagatctacaccctatcctacactctttccctacacgacgctcttccgatcttcagaggagtaaataattggaaaagtaatcagca

SEQ ID NO: 4599 - DNA, 103 bp, Artificial Sequence
  Description of Artificial Sequence: Synthetic polynucleotide
aatgatacggcgaccaccgagatctacaccctatcctacactctttccctacacgacgctcttccgatctaagatgaaataaaacgtctctcttcccttcttt

SEQ ID NO: 4600 - DNA, 103 bp, Artificial Sequence
  Description of Artificial Sequence: Synthetic polynucleotide
aatgatacggcgaccaccgagatctacaccctatcctacactctttccctacacgacgctcttccgatctgttcctttaactgtagacttggaatctactgat

SEQ ID NO: 4601 - DNA, 96 bp, Artificial Sequence
  Description of Artificial Sequence: Synthetic primer
aatgatacggcgaccaccgagatctacaccctatcctacactctttccctacacgacgctcttccgatctctgactataaccacgtacccagtgca

SEQ ID NO: 4602 - DNA, 95 bp, Artificial Sequence
  Description of Artificial Sequence: Synthetic primer
aatgatacggcgaccaccgagatctacaccctatcctacactctttccctacacgacgctcttccgatctaatgccgtgctttctccttttgttg

SEQ ID NO: 4603 - DNA, 98 bp, Artificial Sequence
  Description of Artificial Sequence: Synthetic primer
aatgatacggcgaccaccgagatctacaccctatcctacactctttccctacacgacgctcttccgatctgtttttgcattttcctctacatttgcag

SEQ ID NO: 4604 - DNA, 99 bp, Artificial Sequence
  Description of Artificial Sequence: Synthetic primer
aatgatacggcgaccaccgagatctacaccctatcctacactctttccctacacgacgctcttccgatcttctggcggtgttttgaaattagttatttc

SEQ ID NO: 4605 - DNA, 94 bp, Artificial Sequence
  Description of Artificial Sequence: Synthetic primer
aatgatacggcgaccaccgagatctacaccctatcctacactctttccctacacgacgctcttccgatctggagcttctcttcttcctcaacag

SEQ ID NO: 4606 - DNA, 100 bp, Artificial Sequence
  Description of Artificial Sequence: Synthetic polynucleotide
aatgatacggcgaccaccgagatctacaccctatcctacactctttccctacacgacgctcttccgatcttgatttgtgaatatgcctactgttcataga

SEQ ID NO: 4607 - DNA, 94 bp, Artificial Sequence
  Description of Artificial Sequence: Synthetic primer
aatgatacggcgaccaccgagatctacaccctatcctacactctttccctacacgacgctcttccgatctcccatcaccagatgctatgtgcta

SEQ ID NO: 4608 - DNA, 94 bp, Artificial Sequence
  Description of Artificial Sequence: Synthetic primer
aatgatacggcgaccaccgagatctacaccctatcctacactctttccctacacgacgctcttccgatctgccttctcagatggagccaggatt

SEQ ID NO: 4609 - DNA, 93 bp, Artificial Sequence
  Description of Artificial Sequence: Synthetic primer
aatgatacggcgaccaccgagatctacaccctatcctacactctttccctacacgacgctcttccgatctcctcctcctgtgatctgcaatct

SEQ ID NO: 4610 - DNA, 93 bp, Artificial Sequence
  Description of Artificial Sequence: Synthetic primer
aatgatacggcgaccaccgagatctacaccctatcctacactctttccctacacgacgctcttccgatctgccttttcttttgcttcccttgt

SEQ ID NO: 4611 - DNA, 96 bp, Artificial Sequence
  Description of Artificial Sequence: Synthetic primer
aatgatacggcgaccaccgagatctacaccctatcctacactctttccctacacgacgctcttccgatctgaccttcctggttggccgttatattg

SEQ ID NO: 4612 - DNA, 93 bp, Artificial Sequence
  Description of Artificial Sequence: Synthetic primer
aatgatacggcgaccaccgagatctacaccctatcctacactctttccctacacgacgctcttccgatctcctttcttccctctctccaccag

SEQ ID NO: 4613 - DNA, 96 bp, Artificial Sequence
  Description of Artificial Sequence: Synthetic primer
aatgatacggcgaccaccgagatctacaccctatcctacactctttccctacacgacgctcttccgatcttgctaggattgttaaataaccgcctt

SEQ ID NO: 4614 - DNA, 102 bp, Artificial Sequence
  Description of Artificial Sequence: Synthetic polynucleotide
aatgatacggcgaccaccgagatctacaccctatcctacactctttccctacacgacgctcttccgatctgtatacattctaatactgttttccaaaacagg

SEQ ID NO: 4615 - DNA, 98 bp, Artificial Sequence
  Description of Artificial Sequence: Synthetic primer
aatgatacggcgaccaccgagatctacaccctatcctacactctttccctacacgacgctcttccgatctccatggaatatgttcttttgcatacaga

SEQ ID NO: 4616 - DNA, 90 bp, Artificial Sequence
  Description of Artificial Sequence: Synthetic primer
aatgatacggcgaccaccgagatctacaccctatcctacactctttccctacacgacgctcttccgatctccacgcctagagactccggc

SEQ ID NO: 4617 - DNA, 93 bp, Artificial Sequence
  Description of Artificial Sequence: Synthetic primer
aatgatacggcgaccaccgagatctacaccctatcctacactctttccctacacgacgctcttccgatctcttctctctcccacctttctgca

SEQ ID NO: 4618 - DNA, 94 bp, Artificial Sequence
  Description of Artificial Sequence: Synthetic primer
aatgatacggcgaccaccgagatctacaccctatcctacactctttccctacacgacgctcttccgatctagatgggattaacgtccacatgga

SEQ ID NO: 4619 - DNA, 89 bp, Artificial Sequence
  Description of Artificial Sequence: Synthetic primer
aatgatacggcgaccaccgagatctacaccctatcctacactctttccctacacgacgctcttccgatctggcctctcccgtgcctagt

SEQ ID NO: 4620 - DNA, 89 bp, Artificial Sequence
  Description of Artificial Sequence: Synthetic primer
aatgatacggcgaccaccgagatctacaccctatcctacactctttccctacacgacgctcttccgatcttgggaggcattcagcacct

SEQ ID NO: 4621 - DNA, 91 bp, Artificial Sequence
  Description of Artificial Sequence: Synthetic primer
aatgatacggcgaccaccgagatctacaccctatcctacactctttccctacacgacgctcttccgatctcctgaaccctggaccctgctc

SEQ ID NO: 4622 - DNA, 88 bp, Artificial Sequence
  Description of Artificial Sequence: Synthetic primer
aatgatacggcgaccaccgagatctacaccctatcctacactctttccctacacgacgctcttccgatctggtgagtgagcggaggca

SEQ ID NO: 4623 - DNA, 92 bp, Artificial Sequence
  Description of Artificial Sequence: Synthetic primer
aatgatacggcgaccaccgagatctacaccctatcctacactctttccctacacgacgctcttccgatctcaaatcctcacgcaacccgcag

SEQ ID NO: 4624 - DNA, 88 bp, Artificial Sequence
  Description of Artificial Sequence: Synthetic primer
aatgatacggcgaccaccgagatctacaccctatcctacactctttccctacacgacgctcttccgatctgccggcatgggacagagt

SEQ ID NO: 4625 - DNA, 88 bp, Artificial Sequence
  Description of Artificial Sequence: Synthetic primer
aatgatacggcgaccaccgagatctacaccctatcctacactctttccctacacgacgctcttccgatctcccagacagtgcggagca

SEQ ID NO: 4626 - DNA, 97 bp, Artificial Sequence
  Description of Artificial Sequence: Synthetic primer
aatgatacggcgaccaccgagatctacaccctatcctacactctttccctacacgacgctcttccgatctcagctcagaacctggtatctactttct

SEQ ID NO: 4627 - DNA, 89 bp, Artificial Sequence
  Description of Artificial Sequence: Synthetic primer
aatgatacggcgaccaccgagatctacaccctatcctacactctttccctacacgacgctcttccgatctgccctcagcaccactgacc

SEQ ID NO: 4628 - DNA, 95 bp, Artificial Sequence
  Description of Artificial Sequence: Synthetic primer
aatgatacggcgaccaccgagatctacaccctatcctacactctttccctacacgacgctcttccgatcttgtgtttcccgatcatcttcatcat

SEQ ID NO: 4629 - DNA, 91 bp, Artificial Sequence
  Description of Artificial Sequence: Synthetic primer
aatgatacggcgaccaccgagatctacaccctatcctacactctttccctacacgacgctcttccgatctcaggcgtcctactggcatgac

SEQ ID NO: 4630 - DNA, 89 bp, Artificial Sequence
  Description of Artificial Sequence: Synthetic primer
aatgatacggcgaccaccgagatctacaccctatcctacactctttccctacacgacgctcttccgatctccctgcccaccttctggga

SEQ ID NO: 4631 - DNA, 90 bp, Artificial Sequence
  Description of Artificial Sequence: Synthetic primer
aatgatacggcgaccaccgagatctacaccctatcctacactctttccctacacgacgctcttccgatctctctgcccagttcccgcctc

SEQ ID NO: 4632 - DNA, 90 bp, Artificial Sequence
  Description of Artificial Sequence: Synthetic primer
aatgatacggcgaccaccgagatctacaccctatcctacactctttccctacacgacgctcttccgatctctgggagggtgtgggaaggc

SEQ ID NO: 4633 - DNA, 89 bp, Artificial Sequence
  Description of Artificial Sequence: Synthetic primer
aatgatacggcgaccaccgagatctacaccctatcctacactctttccctacacgacgctcttccgatcttgaggacccagtggagggc

SEQ ID NO: 4634 - DNA, 92 bp, Artificial Sequence
  Description of Artificial Sequence: Synthetic primer
aatgatacggcgaccaccgagatctacaccctatcctacactctttccctacacgacgctcttccgatctactctggtgagtgtagactcgg

SEQ ID NO: 4635 - DNA, 91 bp, Artificial Sequence
  Description of Artificial Sequence: Synthetic primer
aatgatacggcgaccaccgagatctacaccctatcctacactctttccctacacgacgctcttccgatctccgccttattcgggaacagcc

SEQ ID NO: 4636 - DNA, 89 bp, Artificial Sequence
  Description of Artificial Sequence: Synthetic primer
aatgatacggcgaccaccgagatctacaccctatcctacactctttccctacacgacgctcttccgatctcagggtgggctgctaggga

SEQ ID NO: 4637 - DNA, 90 bp, Artificial Sequence
  Description of Artificial Sequence: Synthetic primer
aatgatacggcgaccaccgagatctacaccctatcctacactctttccctacacgacgctcttccgatcttggtgcccactcttcccacc

SEQ ID NO: 4638 - DNA, 98 bp, Artificial Sequence
  Description of Artificial Sequence: Synthetic primer
aatgatacggcgaccaccgagatctacaccctatcctacactctttccctacacgacgctcttccgatctgtctcttaccacctgtaatcaaggtgag

SEQ ID NO: 4639 - DNA, 91 bp, Artificial Sequence
  Description of Artificial Sequence: Synthetic primer
aatgatacggcgaccaccgagatctacaccctatcctacactctttccctacacgacgctcttccgatctcagacggtcttggaacccaga

SEQ ID NO: 4640 - DNA, 90 bp, Artificial Sequence
  Description of Artificial Sequence: Synthetic primer
aatgatacggcgaccaccgagatctacaccctatcctacactctttccctacacgacgctcttccgatctgagcccaaaatgggtcaggc

SEQ ID NO: 4641 - DNA, 92 bp, Artificial Sequence
  Description of Artificial Sequence: Synthetic primer
aatgatacggcgaccaccgagatctacaccctatcctacactctttccctacacgacgctcttccgatctcgatgtgcttcagccactggat

SEQ ID NO: 4642 - DNA, 89 bp, Artificial Sequence
  Description of Artificial Sequence: Synthetic primer
aatgatacggcgaccaccgagatctacaccctatcctacactctttccctacacgacgctcttccgatcttcctggcccttcaggtgct

SEQ ID NO: 4643 - DNA, 89 bp, Artificial Sequence
  Description of Artificial Sequence: Synthetic primer
aatgatacggcgaccaccgagatctacaccctatcctacactctttccctacacgacgctcttccgatcttgccctcgatacagcccgg

SEQ ID NO: 4644 - DNA, 88 bp, Artificial Sequence
  Description of Artificial Sequence: Synthetic primer
aatgatacggcgaccaccgagatctacaccctatcctacactctttccctacacgacgctcttccgatctcccacacagctcagcgca

SEQ ID NO: 4645 - DNA, 90 bp, Artificial Sequence
  Description of Artificial Sequence: Synthetic primer
aatgatacggcgaccaccgagatctacaccctatcctacactctttccctacacgacgctcttccgatctgatgcgcccagtacctgtcg

SEQ ID NO: 4646 - DNA, 92 bp, Artificial Sequence
  Description of Artificial Sequence: Synthetic primer
aatgatacggcgaccaccgagatctacaccctatcctacactctttccctacacgacgctcttccgatctgttacaggtgtgagccaccaca

SEQ ID NO: 4647 - DNA, 90 bp, Artificial Sequence
  Description of Artificial Sequence: Synthetic primer
aatgatacggcgaccaccgagatctacaccctatcctacactctttccctacacgacgctcttccgatctcccaccttcctgggtgcaga

SEQ ID NO: 4648 - DNA, 92 bp, Artificial Sequence
  Description of Artificial Sequence: Synthetic primer
aatgatacggcgaccaccgagatctacaccctatcctacactctttccctacacgacgctcttccgatctggagctggagagactgagaggg

SEQ ID NO: 4649 - DNA, 90 bp, Artificial Sequence
  Description of Artificial Sequence: Synthetic primer
aatgatacggcgaccaccgagatctacaccctatcctacactctttccctacacgacgctcttccgatctagagagggcctcagtgcaga

SEQ ID NO: 4650 - DNA, 92 bp, Artificial Sequence
  Description of Artificial Sequence: Synthetic primer
aatgatacggcgaccaccgagatctacaccctatcctacactctttccctacacgacgctcttccgatctcagaggaggaggaggactggaa

SEQ ID NO: 4651 - DNA, 94 bp, Artificial Sequence
  Description of Artificial Sequence: Synthetic primer
aatgatacggcgaccaccgagatctacaccctatcctacactctttccctacacgacgctcttccgatctggtcccagaccaaatctgaaggag

SEQ ID NO: 4652 - DNA, 92 bp, Artificial Sequence; identical to SEQ ID NO: 4650
  Description of Artificial Sequence: Synthetic primer

SEQ ID NO: 4653 - DNA, 90 bp, Artificial Sequence
  Description of Artificial Sequence: Synthetic primer
aatgatacggcgaccaccgagatctacaccctatcctacactctttccctacacgacgctcttccgatctcctcctcagagacggccagc

SEQ ID NO: 4654 - DNA, 91 bp, Artificial Sequence
  Description of Artificial Sequence: Synthetic primer
aatgatacggcgaccaccgagatctacaccctatcctacactctttccctacacgacgctcttccgatctcctgcacagccttgagccttg

SEQ ID NO: 4655 - DNA, 89 bp, Artificial Sequence
  Description of Artificial Sequence: Synthetic primer
aatgatacggcgaccaccgagatctacaccctatcctacactctttccctacacgacgctcttccgatctagctttcccgacacccgga

SEQ ID NO: 4656 - DNA, 95 bp, Artificial Sequence
  Description of Artificial Sequence: Synthetic primer
aatgatacggcgaccaccgagatctacaccctatcctacactctttccctacacgacgctcttccgatctgggctagactagagagtatccatct

SEQ ID NO: 4657 - DNA, 92 bp, Artificial Sequence
  Description of Artificial Sequence: Synthetic primer
aatgatacggcgaccaccgagatctacaccctatcctacactctttccctacacgacgctcttccgatctctctcgcccatcacaggagtac

SEQ ID NO: 4658 - DNA, 94 bp, Artificial Sequence
  Description of Artificial Sequence: Synthetic primer
aatgatacggcgaccaccgagatctacaccctatcctacactctttccctacacgacgctcttccgatctgtgtgcctgtggaggaacttttca

SEQ ID NO: 4659 - DNA, 89 bp, Artificial Sequence
  Description of Artificial Sequence: Synthetic primer
aatgatacggcgaccaccgagatctacaccctatcctacactctttccctacacgacgctcttccgatctcttcccacctgtgccctca

SEQ ID NO: 4660 - DNA, 90 bp, Artificial Sequence
  Description of Artificial Sequence: Synthetic primer
aatgatacggcgaccaccgagatctacaccctatcctacactctttccctacacgacgctcttccgatctcaccaacgagctgtaagccc

SEQ ID NO: 4661 - DNA, 89 bp, Artificial Sequence; identical to SEQ ID NO: 4659
  Description of Artificial Sequence: Synthetic primer

SEQ ID NO: 4662 - DNA, 90 bp, Artificial Sequence
  Description of Artificial Sequence: Synthetic primer
aatgatacggcgaccaccgagatctacaccctatcctacactctttccctacacgacgctcttccgatctgggcaagagtgggcttgagg

SEQ ID NO: 4663 - DNA, 96 bp, Artificial Sequence
  Description of Artificial Sequence: Synthetic primer
aatgatacggcgaccaccgagatctacaccctatcctacactctttccctacacgacgctcttccgatctgtgtgggatagagagcttctagcact

SEQ ID NO: 4664 - DNA, 90 bp, Artificial Sequence
  Description of Artificial Sequence: Synthetic primer
aatgatacggcgaccaccgagatctacaccctatcctacactctttccctacacgacgctcttccgatctttccagctccctcacctccc

SEQ ID NO: 4665 - DNA, 89 bp, Artificial Sequence
  Description of Artificial Sequence: Synthetic primer
aatgatacggcgaccaccgagatctacaccctatcctacactctttccctacacgacgctcttccgatcttttcagggccgactgcctg

SEQ ID NO: 4666 - DNA, 90 bp, Artificial Sequence; identical to SEQ ID NO: 4664
  Description of Artificial Sequence: Synthetic primer

SEQ ID NO: 4667 - DNA, 91 bp, Artificial Sequence
  Description of Artificial Sequence: Synthetic primer
aatgatacggcgaccaccgagatctacaccctatcctacactctttccctacacgacgctcttccgatctaagccaaacctgctcacctgc

SEQ ID NO: 4668 - DNA, 94 bp, Artificial Sequence
  Description of Artificial Sequence: Synthetic primer
aatgatacggcgaccaccgagatctacaccctatcctacactctttccctacacgacgctcttccgatctcttagcctttatcctgccctcctc

SEQ ID NO: 4669 - DNA, 94 bp, Artificial Sequence
  Description of Artificial Sequence: Synthetic primer
aatgatacggcgaccaccgagatctacaccctatcctacactctttccctacacgacgctcttccgatctcccaacttatgccactctctgttt

SEQ ID NO: 4670 - DNA, 92 bp, Artificial Sequence
  Description of Artificial Sequence: Synthetic primer
aatgatacggcgaccaccgagatctacaccctatcctacactctttccctacacgacgctcttccgatctccctccttgctctagggtgacc

SEQ ID NO: 4671 - DNA, 93 bp, Artificial Sequence
  Description of Artificial Sequence: Synthetic primer
aatgatacggcgaccaccgagatctacaccctatcctacactctttccctacacgacgctcttccgatctaacaccctgttcgcactgactca

SEQ ID NO: 4672 - DNA, 92 bp, Artificial Sequence
  Description of Artificial Sequence: Synthetic primer
aatgatacggcgaccaccgagatctacaccctatcctacactctttccctacacgacgctcttccgatcttcctgtgcttgtccattttgct

SEQ ID NO: 4673 - DNA, 91 bp, Artificial Sequence
  Description of Artificial Sequence: Synthetic primer
aatgatacggcgaccaccgagatctacaccctatcctacactctttccctacacgacgctcttccgatctatgacaagtgcctcctctccc

SEQ ID NO: 4674 - DNA, 96 bp, Artificial Sequence
  Description of Artificial Sequence: Synthetic primer
aatgatacggcgaccaccgagatctacaccctatcctacactctttccctacacgacgctcttccgatctgcattttcctctggaccctcaatgta

SEQ ID NO: 4675 - DNA, 93 bp, Artificial Sequence
  Description of Artificial Sequence: Synthetic primer
aatgatacggcgaccaccgagatctacaccctatcctacactctttccctacacgacgctcttccgatctcagccgtagctccatattggaca

SEQ ID NO: 4676 - DNA, 91 bp, Artificial Sequence
  Description of Artificial Sequence: Synthetic primer
aatgatacggcgaccaccgagatctacaccctatcctacactctttccctacacgacgctcttccgatctcctaggaggaacctcagtgcc

SEQ ID NO: 4677 - DNA, 89 bp, Artificial Sequence
  Description of Artificial Sequence: Synthetic primer
aatgatacggcgaccaccgagatctacaccctatcctacactctttccctacacgacgctcttccgatctggaggtggaggtgcaggac

SEQ ID NO: 4678 - DNA, 90 bp, Artificial Sequence
  Description of Artificial Sequence: Synthetic primer
aatgatacggcgaccaccgagatctacaccctatcctacactctttccctacacgacgctcttccgatctcccttggcttcccttcccgg

SEQ ID NO: 4679 - DNA, 92 bp, Artificial Sequence
  Description of Artificial Sequence: Synthetic primer
aatgatacggcgaccaccgagatctacaccctatcctacactctttccctacacgacgctcttccgatctgctctctccacccaaacccttg

SEQ ID NO: 4680 - DNA, 96 bp, Artificial Sequence
  Description of Artificial Sequence: Synthetic primer
aatgatacggcgaccaccgagatctacaccctatcctacactctttccctacacgacgctcttccgatctctacctagaccctcctaacttttggg

SEQ ID NO: 4681 - DNA, 95 bp, Artificial Sequence
  Description of Artificial Sequence: Synthetic primer
aatgatacggcgaccaccgagatctacaccctatcctacactctttccctacacgacgctcttccgatctcagtgagaagacagcaggcactttc

SEQ ID NO: 4682 - DNA, 96 bp, Artificial Sequence
  Description of Artificial Sequence: Synthetic primer
aatgatacggcgaccaccgagatctacaccctatcctacactctttccctacacgacgctcttccgatctgtaatcagtgttctgtctctttccca

SEQ ID NO: 4683 - DNA, 99 bp, Artificial Sequence
  Description of Artificial Sequence: Synthetic primer
aatgatacggcgaccaccgagatctacaccctatcctacactctttccctacacgacgctcttccgatctcatcttgttccttgttctattgcttttac

SEQ ID NO: 4684 - DNA, 102 bp, Artificial Sequence
  Description of Artificial Sequence: Synthetic polynucleotide
aatgatacggcgaccaccgagatctacaccctatcctacactctttccctacacgacgctcttccgatctcaataaacaaatgaagaaatggatgaatggct

SEQ ID NO: 4685 - DNA, 96 bp, Artificial Sequence
  Description of Artificial Sequence: Synthetic primer
aatgatacggcgaccaccgagatctacaccctatcctacactctttccctacacgacgctcttccgatctattcaccatcttatctcctctgggtt

SEQ ID NO: 4686 - DNA, 99 bp, Artificial Sequence
  Description of Artificial Sequence: Synthetic primer
aatgatacggcgaccaccgagatctacaccctatcctacactctttccctacacgacgctcttccgatctaaagattgcactccaggataatacacatc

SEQ ID NO: 4687 - DNA, 98 bp, Artificial Sequence
  Description of Artificial Sequence: Synthetic primer
aatgatacggcgaccaccgagatctacaccctatcctacactctttccctacacgacgctcttccgatctcttagagttttggcaaaagtgaagactg

SEQ ID NO: 4688 - DNA, 103 bp, Artificial Sequence
  Description of Artificial Sequence: Synthetic polynucleotide
aatgatacggcgaccaccgagatctacaccctatcctacactctttccctacacgacgctcttccgatctaatggacaaatggatggtgtgcttttaatttaa

SEQ ID NO: 4689 - DNA, 102 bp, Artificial Sequence
  Description of Artificial Sequence: Synthetic polynucleotide
aatgatacggcgaccaccgagatctacaccctatcctacactctttccctacacgacgctcttccgatctgacttctgaaataacagtttgctttgtgtatg

SEQ ID NO: 4690 - DNA, 103 bp, Artificial Sequence
  Description of Artificial Sequence: Synthetic polynucleotide
aatgatacggcgaccaccgagatctacaccctatcctacactctttccctacacgacgctcttccgatctgagttttacatttttaatgctcctttctttgac

SEQ ID NO: 4691 - DNA, 93 bp, Artificial Sequence
  Description of Artificial Sequence: Synthetic primer
aatgatacggcgaccaccgagatctacaccctatcctacactctttccctacacgacgctcttccgatcttgcacgtactcaccatttgtctt

SEQ ID NO: 4692 - DNA, 102 bp, Artificial Sequence
  Description of Artificial Sequence: Synthetic polynucleotide
aatgatacggcgaccaccgagatctacaccctatcctacactctttccctacacgacgctcttccgatcttattcctaactgactcatcatttcatctctga

SEQ ID NO: 4693 - DNA, 97 bp, Artificial Sequence
  Description of Artificial Sequence: Synthetic primer
aatgatacggcgaccaccgagatctacaccctatcctacactctttccctacacgacgctcttccgatctgtttggtaagaatggaatgtgccaaat

SEQ ID NO: 4694 - DNA, 97 bp, Artificial Sequence
  Description of Artificial Sequence: Synthetic primer
aatgatacggcgaccaccgagatctacaccctatcctacactctttccctacacgacgctcttccgatctttcatcgctgagtgacactcttttgtt

SEQ ID NO: 4695 - DNA, 94 bp, Artificial Sequence
  Description of Artificial Sequence: Synthetic primer
aatgatacggcgaccaccgagatctacaccctatcctacactctttccctacacgacgctcttccgatctgtatgaaagccagctacagatggt

SEQ ID NO: 4696 - DNA, 97 bp, Artificial Sequence; identical to SEQ ID NO: 4694
  Description of Artificial Sequence: Synthetic primer

SEQ ID NO: 4697 - DNA, 99 bp, Artificial Sequence
  Description of Artificial Sequence: Synthetic primer
aatgatacggcgaccaccgagatctacaccctatcctacactctttccctacacgacgctcttccgatctgatcacagaaggagtctggaatagaaagg

SEQ ID NO: 4698 - DNA, 94 bp, Artificial Sequence
  Description of Artificial Sequence: Synthetic primer
aatgatacggcgaccaccgagatctacaccctatcctacactctttccctacacgacgctcttccgatcttatgcccagccagtgagcttattt

SEQ ID NO: 4699 - DNA, 94 bp, Artificial Sequence
  Description of Artificial Sequence: Synthetic primer
aatgatacggcgaccaccgagatctacaccctatcctacactctttccctacacgacgctcttccgatctttagttgcagcatctcctgtagca

SEQ ID NO: 4700 - DNA, 103 bp, Artificial Sequence
  Description of Artificial Sequence: Synthetic polynucleotide
aatgatacggcgaccaccgagatctacaccctatcctacactctttccctacacgacgctcttccgatctgtttattttatcttctcaatacgtttccctatg

SEQ ID NO: 4701 - DNA, 100 bp, Artificial Sequence
  Description of Artificial Sequence: Synthetic polynucleotide
aatgatacggcgaccaccgagatctacaccctatcctacactctttccctacacgacgctcttccgatctctactttgagatgagtacctattcaacaaa

SEQ ID NO: 4702 - DNA, 103 bp, Artificial Sequence
  Description of Artificial Sequence: Synthetic polynucleotide
aatgatacggcgaccaccgagatctacaccctatcctacactctttccctacacgacgctcttccgatctcaaaaatcactttttttttctcacttgggatgt

SEQ ID NO: 4703 - DNA, 100 bp, Artificial Sequence
  Description of Artificial Sequence: Synthetic polynucleotide
aatgatacggcgaccaccgagatctacaccctatcctacactctttccctacacgacgctcttccgatctaacttgtttagccaaatggtacttcttttc

SEQ ID NO: 4704 - DNA, 102 bp, Artificial Sequence
  Description of Artificial Sequence: Synthetic polynucleotide
aatgatacggcgaccaccgagatctacaccctatcctacactctttccctacacgacgctcttccgatctttttcataatgacatagaatccttttctgagg

SEQ ID NO: 4705 - DNA, 96 bp, Artificial Sequence
  Description of Artificial Sequence: Synthetic primer
aatgatacggcgaccaccgagatctacaccctatcctacactctttccctacacgacgctcttccgatctactagttctctttcctgttttgcaga

SEQ ID NO: 4706 - DNA, 97 bp, Artificial Sequence
  Description of Artificial Sequence: Synthetic primer
aatgatacggcgaccaccgagatctacaccctatcctacactctttccctacacgacgctcttccgatctattcactttgttctatctgcaacgtag

SEQ ID NO: 4707 - DNA, 100 bp, Artificial Sequence
  Description of Artificial Sequence: Synthetic polynucleotide
aatgatacggcgaccaccgagatctacaccctatcctacactctttccctacacgacgctcttccgatcttctttttaaggtgtgcatgtatcaacatta

SEQ ID NO: 4708 - DNA, 90 bp, Artificial Sequence
  Description of Artificial Sequence: Synthetic primer
aatgatacggcgaccaccgagatctacaccctatcctacactctttccctacacgacgctcttccgatcttcggtgacgcgcatccttaa

SEQ ID NO: 4709 - DNA, 90 bp, Artificial Sequence
  Description of Artificial Sequence: Synthetic primer
aatgatacggcgaccaccgagatctacaccctatcctacactctttccctacacgacgctcttccgatctgagcggtggtgggcgttaag

SEQ ID NO: 4710 - DNA, 102 bp, Artificial Sequence
  Description of Artificial Sequence: Synthetic polynucleotide
aatgatacggcgaccaccgagatctacaccctatcctacactctttccctacacgacgctcttccgatctaactaacctgaatccatgaaaacaaggagaat

SEQ ID NO: 4711 - DNA, 91 bp, Artificial Sequence
  Description of Artificial Sequence: Synthetic primer
aatgatacggcgaccaccgagatctacaccctatcctacactctttccctacacgacgctcttccgatctagcctcgaagggcattgcttc

SEQ ID NO: 4712 - DNA, 89 bp, Artificial Sequence
  Description of Artificial Sequence: Synthetic primer
aatgatacggcgaccaccgagatctacaccctatcctacactctttccctacacgacgctcttccgatcttcttgggatgggctgccga

SEQ ID NO: 4713 - DNA, 92 bp, Artificial Sequence
  Description of Artificial Sequence: Synthetic primer
aatgatacggcgaccaccgagatctacaccctatcctacactctttccctacacgacgctcttccgatctgggtctgagatggatcttgcgt

SEQ ID NO: 4714 - DNA, 90 bp, Artificial Sequence
  Description of Artificial Sequence: Synthetic primer
aatgatacggcgaccaccgagatctacaccctatcctacactctttccctacacgacgctcttccgatctgcagagtccgccgcattacc

SEQ ID NO: 4715 - DNA, 90 bp, Artificial Sequence
  Description of Artificial Sequence: Synthetic primer
aatgatacggcgaccaccgagatctacaccctatcctacactctttccctacacgacgctcttccgatcttgttcccgaggcagcccatg

SEQ ID NO: 4716 - DNA, 88 bp, Artificial Sequence
  Description of Artificial Sequence: Synthetic primer
aatgatacggcgaccaccgagatctacaccctatcctacactctttccctacacgacgctcttccgatctcacagacagagcccgcga

SEQ ID NO: 4717 - DNA, 102 bp, Artificial Sequence
  Description of Artificial Sequence: Synthetic polynucleotide
aatgatacggcgaccaccgagatctacaccctatcctacactctttccctacacgacgctcttccgatctacttcctaaaggttagtataaagtctgttcct

SEQ ID NO: 4718 - DNA, 99 bp, Artificial Sequence
  Description of Artificial Sequence: Synthetic primer
aatgatacggcgaccaccgagatctacaccctatcctacactctttccctacacgacgctcttccgatctcagtatgatcttcatgtttgtttggtttg

SEQ ID NO: 4719 - DNA, 88 bp, Artificial Sequence
  Description of Artificial Sequence: Synthetic primer
aatgatacggcgaccaccgagatctacaccctatcctacactctttccctacacgacgctcttccgatctgcacaaggagccagcacg

SEQ ID NO: 4720 - DNA, 89 bp, Artificial Sequence
  Description of Artificial Sequence: Synthetic primer
aatgatacggcgaccaccgagatctacaccctatcctacactctttccctacacgacgctcttccgatctcactgtgctcaggtgggcg

SEQ ID NO: 4721 - DNA, 90 bp, Artificial Sequence
  Description of Artificial Sequence: Synthetic primer
aatgatacggcgaccaccgagatctacaccctatcctacactctttccctacacgacgctcttccgatctatgggttgggtggcggttac

SEQ ID NO: 4722 - DNA, 91 bp, Artificial Sequence
  Description of Artificial Sequence: Synthetic primer
aatgatacggcgaccaccgagatctacaccctatcctacactctttccctacacgacgctcttccgatctcgctcggcacatagtcagcct

SEQ ID NO: 4723 - DNA, 99 bp, Artificial Sequence
  Description of Artificial Sequence: Synthetic primer
aatgatacggcgaccaccgagatctacaccctatcctacactctttccctacacgacgctcttccgatctggtgaatgtcaagaaaccatgatctctgt

SEQ ID NO: 4724 - DNA, 98 bp, Artificial Sequence
  Description of Artificial Sequence: Synthetic primer
aatgatacggcgaccaccgagatctacaccctatcctacactctttccctacacgacgctcttccgatctcaaagccaaccgaaacagtaataattgc

SEQ ID NO: 4725 - DNA, 93 bp, Artificial Sequence
  Description of Artificial Sequence: Synthetic primer
aatgatacggcgaccaccgagatctacaccctatcctacactctttccctacacgacgctcttccgatctgatgaccatgttgtagctgctgc

SEQ ID NO: 4726 - DNA, 92 bp, Artificial Sequence
  Description of Artificial Sequence: Synthetic primer
aatgatacggcgaccaccgagatctacaccctatcctacactctttccctacacgacgctcttccgatctagaaccaccgcaatgaacagcc

SEQ ID NO: 4727 - DNA, 91 bp, Artificial Sequence
  Description of Artificial Sequence: Synthetic primer
aatgatacggcgaccaccgagatctacaccctatcctacactctttccctacacgacgctcttccgatcttacgaacagccaagcccacag

SEQ ID NO: 4728 - DNA, 92 bp, Artificial Sequence; identical to SEQ ID NO: 4726
  Description of Artificial Sequence: Synthetic primer

SEQ ID NO: 4729 - DNA, 90 bp, Artificial Sequence
  Description of Artificial Sequence: Synthetic primer
aatgatacggcgaccaccgagatctacaccctatcctacactctttccctacacgacgctcttccgatctacgtcaaacatgctggtggg

SEQ ID NO: 4730 - DNA, 94 bp, Artificial Sequence
  Description of Artificial Sequence: Synthetic primer
aatgatacggcgaccaccgagatctacaccctatcctacactctttccctacacgacgctcttccgatctgatcttgcttgttgaggaacagga

SEQ ID NO: 4731 - DNA, 97 bp, Artificial Sequence
  Description of Artificial Sequence: Synthetic primer
aatgatacggcgaccaccgagatctacaccctatcctacactctttccctacacgacgctcttccgatctgaggaggaacaagagaggaaactaaag

SEQ ID NO: 4732 - DNA, 97 bp, Artificial Sequence
  Description of Artificial Sequence: Synthetic primer
aatgatacggcgaccaccgagatctacaccctatcctacactctttccctacacgacgctcttccgatctctatggtgggtgattaactgcttgtac

SEQ ID NO: 4733 - DNA, 92 bp, Artificial Sequence; identical to SEQ ID NO: 4726
  Description of Artificial Sequence: Synthetic primer

SEQ ID NO: 4734 - DNA, 94 bp, Artificial Sequence
  Description of Artificial Sequence: Synthetic primer
aatgatacggcgaccaccgagatctacaccctatcctacactctttccctacacgacgctcttccgatcttccacactggatgtgcgtgaacta

SEQ ID NO: 4735 - DNA, 97 bp, Artificial Sequence; identical to SEQ ID NO: 4732
  Description of Artificial Sequence: Synthetic primer

SEQ ID NO: 4736 - DNA, 103 bp, Artificial Sequence
  Description of Artificial Sequence: Synthetic polynucleotide
aatgatacggcgaccaccgagatctacaccctatcctacactctttccctacacgacgctcttccgatctgaatacattagcagattaggtaacaaagtgtcc

SEQ ID NO: 4737 - DNA, 103 bp, Artificial Sequence
  Description of Artificial Sequence: Synthetic polynucleotide
aatgatacggcgaccaccgagatctacaccctatcctacactctttccctacacgacgctcttccgatctagtaatcatgtaattcactccttgttttttctg

SEQ ID NO: 4738 - DNA, 102 bp, Artificial Sequence
  Description of Artificial Sequence: Synthetic polynucleotide
aatgatacggcgaccaccgagatctacaccctatcctacactctttccctacacgacgctcttccgatcttccctaagtttgtaagtagtgctatatttatg

SEQ ID NO: 4739 - DNA, 94 bp, Artificial Sequence
  Description of Artificial Sequence: Synthetic primer
aatgatacggcgaccaccgagatctacaccctatcctacactctttccctacacgacgctcttccgatcttggtgtcactgacattctcattgt

SEQ ID NO: 4740 - DNA, 102 bp, Artificial Sequence
  Description of Artificial Sequence: Synthetic polynucleotide
aatgatacggcgaccaccgagatctacaccctatcctacactctttccctacacgacgctcttccgatctttggaaagtaatagggtattaaaactgccttt

SEQ ID NO: 4741 - DNA, 99 bp, Artificial Sequence
  Description of Artificial Sequence: Synthetic primer
aatgatacggcgaccaccgagatctacaccctatcctacactctttccctacacgacgctcttccgatctggtctgatgagctgctattgttcatcttt

SEQ ID NO: 4742 - DNA, 90 bp, Artificial Sequence
  Description of Artificial Sequence: Synthetic primer
aatgatacggcgaccaccgagatctacaccctatcctacactctttccctacacgacgctcttccgatctcagcggaggcactttggaag

SEQ ID NO: 4743 - DNA, 91 bp, Artificial Sequence
  Description of Artificial Sequence: Synthetic primer
aatgatacggcgaccaccgagatctacaccctatcctacactctttccctacacgacgctcttccgatctctttgctcagccctgactcga

SEQ ID NO: 4744 - DNA, 90 bp, Artificial Sequence
  Description of Artificial Sequence: Synthetic primer
aatgatacggcgaccaccgagatctacaccctatcctacactctttccctacacgacgctcttccgatctctaggctctcctgggagcgg

SEQ ID NO: 4745 - DNA, 90 bp, Artificial Sequence
  Description of Artificial Sequence: Synthetic primer
aatgatacggcgaccaccgagatctacaccctatcctacactctttccctacacgacgctcttccgatctgggccctcccagggaagatg

SEQ ID NO: 4746 - DNA, 90 bp, Artificial Sequence
  Description of Artificial Sequence: Synthetic primer
aatgatacggcgaccaccgagatctacaccctatcctacactctttccctacacgacgctcttccgatctaaccagcactgtttcccgcc

SEQ ID NO: 4747 - DNA, 89 bp, Artificial Sequence
  Description of Artificial Sequence: Synthetic primer
aatgatacggcgaccaccgagatctacaccctatcctacactctttccctacacgacgctcttccgatcttgacgaggttggagcccag

SEQ ID NO: 4748 - DNA, 89 bp, Artificial Sequence
  Description of Artificial Sequence: Synthetic primer
aatgatacggcgaccaccgagatctacaccctatcctacactctttccctacacgacgctcttccgatctcccaaccctcccaccttcc

SEQ ID NO: 4749 - DNA, 94 bp, Artificial Sequence
  Description of Artificial Sequence: Synthetic primer
aatgatacggcgaccaccgagatctacaccctatcctacactctttccctacacgacgctcttccgatctcagcttggcttctgtactcagcag

SEQ ID NO: 4750 - DNA, 90 bp, Artificial Sequence
  Description of Artificial Sequence: Synthetic primer
aatgatacggcgaccaccgagatctacaccctatcctacactctttccctacacgacgctcttccgatctcatgagcctcccacccaggt

SEQ ID NO: 4751 - DNA, 94 bp, Artificial Sequence
  Description of Artificial Sequence: Synthetic primer
aatgatacggcgaccaccgagatctacaccctatcctacactctttccctacacgacgctcttccgatctacctctatcatcatctcctgctgt

SEQ ID NO: 4752 - DNA, 89 bp, Artificial Sequence
  Description of Artificial Sequence: Synthetic primer
aatgatacggcgaccaccgagatctacaccctatcctacactctttccctacacgacgctcttccgatctagggcgctcaggttggtgg

SEQ ID NO: 4753 - DNA, 90 bp, Artificial Sequence
  Description of Artificial Sequence: Synthetic primer
aatgatacggcgaccaccgagatctacaccctatcctacactctttccctacacgacgctcttccgatctgcagggacagtaagggaggg

SEQ ID NO: 4754 - DNA, 90 bp, Artificial Sequence
  Description of Artificial Sequence: Synthetic primer
aatgatacggcgaccaccgagatctacaccctatcctacactctttccctacacgacgctcttccgatctccaagcaggcagtacaggcc

SEQ ID NO: 4755 - DNA, 90 bp, Artificial Sequence
  Description of Artificial Sequence: Synthetic primer
aatgatacggcgaccaccgagatctacaccctatcctacactctttccctacacgacgctcttccgatctccggtccctcctgatcccat

SEQ ID NO: 4756 - DNA, 90 bp, Artificial Sequence
  Description of Artificial Sequence: Synthetic primer
aatgatacggcgaccaccgagatctacaccctatcctacactctttccctacacgacgctcttccgatctctcaggacctcgcccgaagc

SEQ ID NO: 4757 - DNA, 90 bp, Artificial Sequence
  Description of Artificial Sequence: Synthetic primer
aatgatacggcgaccaccgagatctacaccctatcctacactctttccctacacgacgctcttccgatctcctaccggaagcaggtggtc

SEQ ID NO: 4758 - DNA, 91 bp, Artificial Sequence
  Description of Artificial Sequence: Synthetic primer
aatgatacggcgaccaccgagatctacaccctatcctacactctttccctacacgacgctcttccgatctggagaccctgtaggaggaccc

SEQ ID NO: 4759 - DNA, 92 bp, Artificial Sequence
  Description of Artificial Sequence: Synthetic primer
aatgatacggcgaccaccgagatctacaccctatcctacactctttccctacacgacgctcttccgatctggattcctaccggaagcaggtg

SEQ ID NO: 4760 - DNA, 91 bp, Artificial Sequence; identical to SEQ ID NO: 4758
  Description of Artificial Sequence: Synthetic primer

SEQ ID NO: 4761 - DNA, 97 bp, Artificial Sequence
  Description of Artificial Sequence: Synthetic primer
aatgatacggcgaccaccgagatctacaccctatcctacactctttccctacacgacgctcttccgatctacctgctaccatatcagagaccaacta

SEQ ID NO: 4762 - DNA, 102 bp, Artificial Sequence
  Description of Artificial Sequence: Synthetic polynucleotide
aatgatacggcgaccaccgagatctacaccctatcctacactctttccctacacgacgctcttccgatctactatgagacatttggaaacctctataactag

SEQ ID NO: 4763 - DNA, 91 bp, Artificial Sequence
  Description of Artificial Sequence: Synthetic primer
aatgatacggcgaccaccgagatctacaccctatcctacactctttccctacacgacgctcttccgatcttggacccaacgcttcatgctc

SEQ ID NO: 4764 - DNA, 99 bp, Artificial Sequence
  Description of Artificial Sequence: Synthetic primer
aatgatacggcgaccaccgagatctacaccctatcctacactctttccctacacgacgctcttccgatctttattctcttttaccttttgtttcccagg

SEQ ID NO: 4765 - DNA, 105 bp, Artificial Sequence
  Description of Artificial Sequence: Synthetic polynucleotide
aatgatacggcgaccaccgagatctacaccctatcctacactctttccctacacgacgctcttccgatctcattacatttattcttctcccttttttcctctcac

SEQ ID NO: 4766 - DNA, 98 bp, Artificial Sequence
  Description of Artificial Sequence: Synthetic primer
aatgatacggcgaccaccgagatctacaccctatcctacactctttccctacacgacgctcttccgatctattctccttacaattcctgctagggtat

SEQ ID NO: 4767 - DNA, 90 bp, Artificial Sequence
  Description of Artificial Sequence: Synthetic primer
aatgatacggcgaccaccgagatctacaccctatcctacactctttccctacacgacgctcttccgatctgggtggcacggtcttcagag

SEQ ID NO: 4768 - DNA, 99 bp, Artificial Sequence
  Description of Artificial Sequence: Synthetic primer
aatgatacggcgaccaccgagatctacaccctatcctacactctttccctacacgacgctcttccgatctatccatttgtctgaaaaactttgcttcta

SEQ ID NO: 4769 - DNA, 103 bp, Artificial Sequence
  Description of Artificial Sequence: Synthetic polynucleotide
aatgatacggcgaccaccgagatctacaccctatcctacactctttccctacacgacgctcttccgatcttgaattgttcttttagtagtcactacgttgttt

SEQ ID NO: 4770 - DNA, 93 bp, Artificial Sequence
  Description of Artificial Sequence: Synthetic primer
aatgatacggcgaccaccgagatctacaccctatcctacactctttccctacacgacgctcttccgatctccctgatgtgagtggtgctctct

SEQ ID NO: 4771 - DNA, 91 bp, Artificial Sequence
  Description of Artificial Sequence: Synthetic primer
aatgatacggcgaccaccgagatctacaccctatcctacactctttccctacacgacgctcttccgatcttgcccagatgctggagaaggt

SEQ ID NO: 4772 - DNA, 90 bp, Artificial Sequence
  Description of Artificial Sequence: Synthetic primer
aatgatacggcgaccaccgagatctacaccctatcctacactctttccctacacgacgctcttccgatctcctcactagctggctcggct

SEQ ID NO: 4773 - DNA, 92 bp, Artificial Sequence
  Description of Artificial Sequence: Synthetic primer
aatgatacggcgaccaccgagatctacaccctatcctacactctttccctacacgacgctcttccgatctagacctcatcaggtgagcatgg

SEQ ID NO: 4774 - DNA, 90 bp, Artificial Sequence
  Description of Artificial Sequence: Synthetic primer
aatgatacggcgaccaccgagatctacaccctatcctacactctttccctacacgacgctcttccgatctgcgaggccctgagagaaagg

SEQ ID NO: 4775 - DNA, 90 bp, Artificial Sequence; identical to SEQ ID NO: 4772
  Description of Artificial Sequence: Synthetic primer

SEQ ID NO: 4776 - DNA, 90 bp, Artificial Sequence; identical to SEQ ID NO: 4774
  Description of Artificial Sequence: Synthetic primer

SEQ ID NO: 4777 - DNA, 100 bp, Artificial Sequence
  Description of Artificial Sequence: Synthetic polynucleotide
aatgatacggcgaccaccgagatctacaccctatcctacactctttccctacacgacgctcttccgatctgcactataagaccgacttcgacaagaataa

SEQ ID NO: 4778 - DNA, 88 bp, Artificial Sequence
  Description of Artificial Sequence: Synthetic primer
aatgatacggcgaccaccgagatctacaccctatcctacactctttccctacacgacgctcttccgatctatcgccaggctagggcac

SEQ ID NO: 4779 - DNA, 91 bp, Artificial Sequence
  Description of Artificial Sequence: Synthetic primer
aatgatacggcgaccaccgagatctacaccctatcctacactctttccctacacgacgctcttccgatcttgcagtacaaggccacagact

SEQ ID NO: 4780 - DNA, 90 bp, Artificial Sequence
  Description of Artificial Sequence: Synthetic primer
aatgatacggcgaccaccgagatctacaccctatcctacactctttccctacacgacgctcttccgatctctggttgaaagatggcggct

SEQ ID NO: 4781 - DNA, 93 bp, Artificial Sequence
  Description of Artificial Sequence: Synthetic primer
aatgatacggcgaccaccgagatctacaccctatcctacactctttccctacacgacgctcttccgatcttgtcatgtccctgagtcactggg

SEQ ID NO: 4782 - DNA, 91 bp, Artificial Sequence
  Description of Artificial Sequence: Synthetic primer
aatgatacggcgaccaccgagatctacaccctatcctacactctttccctacacgacgctcttccgatctgggcatgatgcgctgtgtgtc

SEQ ID NO: 4783 - DNA, 91 bp, Artificial Sequence
  Description of Artificial Sequence: Synthetic primer
aatgatacggcgaccaccgagatctacaccctatcctacactctttccctacacgacgctcttccgatcttcgttcgctctccagcttggg

SEQ ID NO: 4784 - DNA, 97 bp, Artificial Sequence
  Description of Artificial Sequence: Synthetic primer
aatgatacggcgaccaccgagatctacaccctatcctacactctttccctacacgacgctcttccgatctgcatttccagaaatatcaccattctga

SEQ ID NO: 4785 - DNA, 100 bp, Artificial Sequence
  Description of Artificial Sequence: Synthetic polynucleotide
aatgatacggcgaccaccgagatctacaccctatcctacactctttccctacacgacgctcttccgatctgcatgtacctagtattagcatagcataatt

SEQ ID NO: 4786 - DNA, 100 bp, Artificial Sequence
  Description of Artificial Sequence: Synthetic polynucleotide
aatgatacggcgaccaccgagatctacaccctatcctacactctttccctacacgacgctcttccgatctcccattttgccttttagcattaagtgagtt

SEQ ID NO: 4787 - DNA, 103 bp, Artificial Sequence
  Description of Artificial Sequence: Synthetic polynucleotide
aatgatacggcgaccaccgagatctacaccctatcctacactctttccctacacgacgctcttccgatcttcctgattaagtgacttattaaacagcaagata

SEQ ID NO: 4788 - DNA, 102 bp, Artificial Sequence
  Description of Artificial Sequence: Synthetic polynucleotide
aatgatacggcgaccaccgagatctacaccctatcctacactctttccctacacgacgctcttccgatcttataaaatctctactcacacttatgtgtaagg

SEQ ID NO: 4789 - DNA, 101 bp, Artificial Sequence
  Description of Artificial Sequence: Synthetic polynucleotide
aatgatacggcgaccaccgagatctacaccctatcctacactctttccctacacgacgctcttccgatctatatgatagtcttggatctttgctcgaatac

SEQ ID NO: 4790 - DNA, 102 bp, Artificial Sequence
  Description of Artificial Sequence: Synthetic polynucleotide
aatgatacggcgaccaccgagatctacaccctatcctacactctttccctacacgacgctcttccgatctcaaagaacaagaacatatcattaaggattacc

SEQ ID NO: 4791 - DNA, 103 bp, Artificial Sequence
  Description of Artificial Sequence: Synthetic polynucleotide
aatgatacggcgaccaccgagatctacaccctatcctacactctttccctacacgacgctcttccgatctgaaaccattattcaatcataaagcaaacttacc

SEQ ID NO: 4792 - DNA, 101 bp, Artificial Sequence
  Description of Artificial Sequence: Synthetic polynucleotide
aatgatacggcgaccaccgagatctacaccctatcctacactctttccctacacgacgctcttccgatctcactctgttaaatcttctttgtaaatacagc

SEQ ID NO: 4793 - DNA, 102 bp, Artificial Sequence
  Description of Artificial Sequence: Synthetic polynucleotide
aatgatacggcgaccaccgagatctacaccctatcctacactctttccctacacgacgctcttccgatctagtgttaccactaataagtgtgacatactaac

SEQ ID NO: 4794 - DNA, 99 bp, Artificial Sequence
  Description of Artificial Sequence: Synthetic primer
aatgatacggcgaccaccgagatctacaccctatcctacactctttccctacacgacgctcttccgatctccacataaacaatccatgaccagtaattt

SEQ ID NO: 4795 - DNA, 105 bp, Artificial Sequence
  Description of Artificial Sequence: Synthetic polynucleotide
aatgatacggcgaccaccgagatctacaccctatcctacactctttccctacacgacgctcttccgatctggacaaaaaagacagtaatgagtatctaatgactt

SEQ ID NO: 4796 - DNA, 102 bp, Artificial Sequence
  Description of Artificial Sequence: Synthetic polynucleotide
aatgatacggcgaccaccgagatctacaccctatcctacactctttccctacacgacgctcttccgatctactacatgaacaatataaagaacatacacacc

SEQ ID NO: 4797 - DNA, 102 bp, Artificial Sequence
  Description of Artificial Sequence: Synthetic polynucleotide
aatgatacggcgaccaccgagatctacaccctatcctacactctttccctacacgacgctcttccgatctagaaaggcattagaaagcctgtagttttactt

SEQ ID NO: 4798 - DNA, 99 bp, Artificial Sequence
  Description of Artificial Sequence: Synthetic primer
aatgatacggcgaccaccgagatctacaccctatcctacactctttccctacacgacgctcttccgatctactcctgaaccagaatatctgcattaaaa

SEQ ID NO: 4799 - DNA, 103 bp, Artificial Sequence
  Description of Artificial Sequence: Synthetic polynucleotide
aatgatacggcgaccaccgagatctacaccctatcctacactctttccctacacgacgctcttccgatctcatccaattacagatttattttttgtttccagg

SEQ ID NO: 4800 - DNA, 95 bp, Artificial Sequence
  Description of Artificial Sequence: Synthetic primer
aatgatacggcgaccaccgagatctacaccctatcctacactctttccctacacgacgctcttccgatctctttacaccactgcccaagtaaagc

SEQ ID NO: 4801 - DNA, 103 bp, Artificial Sequence
  Description of Artificial Sequence: Synthetic polynucleotide
aatgatacggcgaccaccgagatctacaccctatcctacactctttccctacacgacgctcttccgatcttatataaacttactctttgagaatccagagcac

SEQ ID NO: 4802 - DNA, 102 bp, Artificial Sequence
  Description of Artificial Sequence: Synthetic polynucleotide
aatgatacggcgaccaccgagatctacaccctatcctacactctttccctacacgacgctcttccgatctgatagaaagctggaaaatcaataagatcattc

SEQ ID NO: 4803 - DNA, 102 bp, Artificial Sequence
  Description of Artificial Sequence: Synthetic polynucleotide
aatgatacggcgaccaccgagatctacaccctatcctacactctttccctacacgacgctcttccgatctaatgttgtagaaagtgaactttagaaacgctc

SEQ ID NO: 4804 - DNA, 98 bp, Artificial Sequence
  Description of Artificial Sequence: Synthetic primer
aatgatacggcgaccaccgagatctacaccctatcctacactctttccctacacgacgctcttccgatctattacacaggatgccaaacacatacctt

SEQ ID NO: 4805 - DNA, 102 bp, Artificial Sequence
  Description of Artificial Sequence: Synthetic polynucleotide
aatgatacggcgaccaccgagatctacaccctatcctacactctttccctacacgacgctcttccgatctgcttcatctacagcaaataatcaggatattag

SEQ ID NO: 4806 - DNA, 101 bp, Artificial Sequence
  Description of Artificial Sequence: Synthetic polynucleotide
aatgatacggcgaccaccgagatctacaccctatcctacactctttccctacacgacgctcttccgatctaacaacaataaagtttgaagtctgtgctcta

SEQ ID NO: 4807 - DNA, 102 bp, Artificial Sequence
  Description of Artificial Sequence: Synthetic polynucleotide
aatgatacggcgaccaccgagatctacaccctatcctacactctttccctacacgacgctcttccgatctaaaactgaaagtaaataaaaagcacactgacc

SEQ ID NO: 4808 - DNA, 93 bp, Artificial Sequence
  Description of Artificial Sequence: Synthetic primer
aatgatacggcgaccaccgagatctacaccctatcctacactctttccctacacgacgctcttccgatctgggcatccatctggtcttggtaa

SEQ ID NO: 4809 - DNA, 104 bp, Artificial Sequence
  Description of Artificial Sequence: Synthetic polynucleotide
aatgatacggcgaccaccgagatctacaccctatcctacactctttccctacacgacgctcttccgatctttgttctgtaaatctactttggtctcagaatgaa

SEQ ID NO: 4810 - DNA, 90 bp, Artificial Sequence
  Description of Artificial Sequence: Synthetic primer
aatgatacggcgaccaccgagatctacaccctatcctacactctttccctacacgacgctcttccgatctcacaggcttcgccgagtagt

SEQ ID NO: 4811 - DNA, 91 bp, Artificial Sequence
  Description of Artificial Sequence: Synthetic primer
aatgatacggcgaccaccgagatctacaccctatcctacactctttccctacacgacgctcttccgatctagcctaatctcgtcgcccacg

SEQ ID NO: 4812 - DNA, 98 bp, Artificial Sequence
  Description of Artificial Sequence: Synthetic primer
aatgatacggcgaccaccgagatctacaccctatcctacactctttccctacacgacgctcttccgatctattaaattcttgaaagcacagcactgca

SEQ ID NO: 4813 - DNA, 90 bp, Artificial Sequence
  Description of Artificial Sequence: Synthetic primer
aatgatacggcgaccaccgagatctacaccctatcctacactctttccctacacgacgctcttccgatctctgtgagaggacagcggacc

SEQ ID NO: 4814 - DNA, 104 bp, Artificial Sequence
  Description of Artificial Sequence: Synthetic polynucleotide
aatgatacggcgaccaccgagatctacaccctatcctacactctttccctacacgacgctcttccgatctagaagtcttctttagataagtgagttctcaactc

SEQ ID NO: 4815 - DNA, 102 bp, Artificial Sequence
  Description of Artificial Sequence: Synthetic polynucleotide
aatgatacggcgaccaccgagatctacaccctatcctacactctttccctacacgacgctcttccgatctgaaagagaaaacttatcatctcccacagagac

SEQ ID NO: 4816 - DNA, 103 bp, Artificial Sequence
  Description of Artificial Sequence: Synthetic polynucleotide
aatgatacggcgaccaccgagatctacaccctatcctacactctttccctacacgacgctcttccgatcttgtctaataatttcttctttcactactgccagt

SEQ ID NO: 4817 - DNA, 93 bp, Artificial Sequence
  Description of Artificial Sequence: Synthetic primer
aatgatacggcgaccaccgagatctacaccctatcctacactctttccctacacgacgctcttccgatctcagggcaaggtccatttcttacc

SEQ ID NO: 4818 - DNA, 99 bp, Artificial Sequence
  Description of Artificial Sequence: Synthetic primer
aatgatacggcgaccaccgagatctacaccctatcctacactctttccctacacgacgctcttccgatctattaaaaggagcccttcatgttacttact

SEQ ID NO: 4819 - DNA, 96 bp, Artificial Sequence
  Description of Artificial Sequence: Synthetic primer
aatgatacggcgaccaccgagatctacaccctatcctacactctttccctacacgacgctcttccgatctgcagtgccaaaaataatcatctcacc

SEQ ID NO: 4820 - DNA, 98 bp, Artificial Sequence
  Description of Artificial Sequence: Synthetic primer
aatgatacggcgaccaccgagatctacaccctatcctacactctttccctacacgacgctcttccgatcttcatgactgatatggtagacagagccta

SEQ ID NO: 4821 - DNA, 94 bp, Artificial Sequence
  Description of Artificial Sequence: Synthetic primer
aatgatacggcgaccaccgagatctacaccctatcctacactctttccctacacgacgctcttccgatcttcctcaacaaccttccactgtact

SEQ ID NO: 4822 - DNA, 94 bp, Artificial Sequence
  Description of Artificial Sequence: Synthetic primer
aatgatacggcgaccaccgagatctacaccctatcctacactctttccctacacgacgctcttccgatctaaaaagcacaactggcaaactgat

SEQ ID NO: 4823 - DNA, 100 bp, Artificial Sequence
  Description of Artificial Sequence: Synthetic polynucleotide
aatgatacggcgaccaccgagatctacaccctatcctacactctttccctacacgacgctcttccgatctagaaaactcattgtttcaggtggaacaaaa

SEQ ID NO: 4824 - DNA, 91 bp, Artificial Sequence
  Description of Artificial Sequence: Synthetic primer
aatgatacggcgaccaccgagatctacaccctatcctacactctttccctacacgacgctcttccgatctcagcttggacacggctttacc

SEQ ID NO: 4825 - DNA, 93 bp, Artificial Sequence
  Description of Artificial Sequence: Synthetic primer
aatgatacggcgaccaccgagatctacaccctatcctacactctttccctacacgacgctcttccgatctgcttgagcatctttacagcgaca

SEQ ID NO: 4826 - DNA, 91 bp, Artificial Sequence; identical to SEQ ID NO: 4824
  Description of Artificial Sequence: Synthetic primer

SEQ ID NO: 4827 - DNA, 98 bp, Artificial Sequence
  Description of Artificial Sequence: Synthetic primer
aatgatacggcgaccaccgagatctacaccctatcctacactctttccctacacgacgctcttccgatcttgcctgtcaacagctaactatttatgta

SEQ ID NO: 4828 - DNA, 104 bp, Artificial Sequence
  Description of Artificial Sequence: Synthetic polynucleotide
aatgatacggcgaccaccgagatctacaccctatcctacactctttccctacacgacgctcttccgatctatatacatactctctgtaaagttactcttggttg

SEQ ID NO: 4829 - DNA, 99 bp, Artificial Sequence
  Description of Artificial Sequence: Synthetic primer
aatgatacggcgaccaccgagatctacaccctatcctacactctttccctacacgacgctcttccgatctacaaaactctttagagaatcactcccact

SEQ ID NO: 4830 - DNA, 103 bp, Artificial Sequence
  Description of Artificial Sequence: Synthetic polynucleotide
aatgatacggcgaccaccgagatctacaccctatcctacactctttccctacacgacgctcttccgatctactattaggttggaggagaaaagaaaaccattt

SEQ ID NO: 4831 - DNA, 98 bp, Artificial Sequence
  Description of Artificial Sequence: Synthetic primer
aatgatacggcgaccaccgagatctacaccctatcctacactctttccctacacgacgctcttccgatcttgaaactaaaaatcctttgcaggactgt

SEQ ID NO: 4832 - DNA, 96 bp, Artificial Sequence
  Description of Artificial Sequence: Synthetic primer
aatgatacggcgaccaccgagatctacaccctatcctacactctttccctacacgacgctcttccgatctaagagaacagctcccaaagaaaaatc

SEQ ID NO: 4833 - DNA, 98 bp, Artificial Sequence
  Description of Artificial Sequence: Synthetic primer
aatgatacggcgaccaccgagatctacaccctatcctacactctttccctacacgacgctcttccgatctaagggaaaacgtgacctaaaggaaaaat

SEQ ID NO: 4834 - DNA, 90 bp, Artificial Sequence
  Description of Artificial Sequence: Synthetic primer
aatgatacggcgaccaccgagatctacaccctatcctacactctttccctacacgacgctcttccgatctaggacacacctggaactggg

SEQ ID NO: 4835 - DNA, 97 bp, Artificial Sequence
  Description of Artificial Sequence: Synthetic primer
aatgatacggcgaccaccgagatctacaccctatcctacactctttccctacacgacgctcttccgatctaaccatcatggaagccaaaagaagaga

SEQ ID NO: 4836 - DNA, 93 bp, Artificial Sequence
  Description of Artificial Sequence: Synthetic primer
aatgatacggcgaccaccgagatctacaccctatcctacactctttccctacacgacgctcttccgatctgggagttgtgtcctttggactgc

SEQ ID NO: 4837 - DNA, 89 bp, Artificial Sequence
  Description of Artificial Sequence: Synthetic primer
aatgatacggcgaccaccgagatctacaccctatcctacactctttccctacacgacgctcttccgatcttccacccacggaggctcct

SEQ ID NO: 4838 - DNA, 95 bp, Artificial Sequence
  Description of Artificial Sequence: Synthetic primer
aatgatacggcgaccaccgagatctacaccctatcctacactctttccctacacgacgctcttccgatctcctcttcctgtcctttctacaccct

SEQ ID NO: 4839 - DNA, 89 bp, Artificial Sequence
  Description of Artificial Sequence: Synthetic primer
aatgatacggcgaccaccgagatctacaccctatcctacactctttccctacacgacgctcttccgatcttggccgcccgaaacatcct

SEQ ID NO: 4840 - DNA, 93 bp, Artificial Sequence
  Description of Artificial Sequence: Synthetic primer
aatgatacggcgaccaccgagatctacaccctatcctacactctttccctacacgacgctcttccgatcttgtgacagatcctgccttctcca

SEQ ID NO: 4841 - DNA, 90 bp, Artificial Sequence
  Description of Artificial Sequence: Synthetic primer
aatgatacggcgaccaccgagatctacaccctatcctacactctttccctacacgacgctcttccgatctatgacccgctaggcgacaat

SEQ ID NO: 4842 - DNA, 89 bp, Artificial Sequence
  Description of Artificial Sequence: Synthetic primer
aatgatacggcgaccaccgagatctacaccctatcctacactctttccctacacgacgctcttccgatctagaggcgctgcttaccact

SEQ ID NO: 4843 - DNA, 91 bp, Artificial Sequence
  Description of Artificial Sequence: Synthetic primer
aatgatacggcgaccaccgagatctacaccctatcctacactctttccctacacgacgctcttccgatctaagggcagactgacatccagt

SEQ ID NO: 4844 - DNA, 100 bp, Artificial Sequence
  Description of Artificial Sequence: Synthetic polynucleotide
aatgatacggcgaccaccgagatctacaccctatcctacactctttccctacacgacgctcttccgatctgtttgccaaacagactcttcattcatcaaa

SEQ ID NO: 4845 - DNA, 89 bp, Artificial Sequence
  Description of Artificial Sequence: Synthetic primer
aatgatacggcgaccaccgagatctacaccctatcctacactctttccctacacgacgctcttccgatctgcctctccctgctgccaac

SEQ ID NO: 4846 - DNA, 98 bp, Artificial Sequence
  Description of Artificial Sequence: Synthetic primer
aatgatacggcgaccaccgagatctacaccctatcctacactctttccctacacgacgctcttccgatctaaatttgggattattggagtggaagaaa

SEQ ID NO: 4847 - DNA, 93 bp, Artificial Sequence
  Description of Artificial Sequence: Synthetic primer
aatgatacggcgaccaccgagatctacaccctatcctacactctttccctacacgacgctcttccgatctcattcagcatgagaacctgggcc

SEQ ID NO: 4848 - DNA, 94 bp, Artificial Sequence
  Description of Artificial Sequence: Synthetic primer
aatgatacggcgaccaccgagatctacaccctatcctacactctttccctacacgacgctcttccgatcttctggtttttctccctcatcctct

SEQ ID NO: 4849 - DNA, 92 bp, Artificial Sequence
  Description of Artificial Sequence: Synthetic primer
aatgatacggcgaccaccgagatctacaccctatcctacactctttccctacacgacgctcttccgatctgagagtgtctgtcgctcagtcc

SEQ ID NO: 4850 - DNA, 97 bp, Artificial Sequence
  Description of Artificial Sequence: Synthetic primer
aatgatacggcgaccaccgagatctacaccctatcctacactctttccctacacgacgctcttccgatctctgtcttcttctatctctgactcctcc

SEQ ID NO: 4851 - DNA, 90 bp, Artificial Sequence
  Description of Artificial Sequence: Synthetic primer
aatgatacggcgaccaccgagatctacaccctatcctacactctttccctacacgacgctcttccgatctggacggctacttccggctga

SEQ ID NO: 4852 - DNA, 88 bp, Artificial Sequence
  Description of Artificial Sequence: Synthetic primer
aatgatacggcgaccaccgagatctacaccctatcctacactctttccctacacgacgctcttccgatctatgggcgtggtttggcgg

SEQ ID NO: 4853 - DNA, 89 bp, Artificial Sequence
  Description of Artificial Sequence: Synthetic primer
aatgatacggcgaccaccgagatctacaccctatcctacactctttccctacacgacgctcttccgatcttcatggacctggagcggct

SEQ ID NO: 4854 - DNA, 92 bp, Artificial Sequence
  Description of Artificial Sequence: Synthetic primer
aatgatacggcgaccaccgagatctacaccctatcctacactctttccctacacgacgctcttccgatcttaaagcctgggtttgtgtgtgt

SEQ ID NO: 4855 - DNA, 89 bp, Artificial Sequence
  Description of Artificial Sequence: Synthetic primer
aatgatacggcgaccaccgagatctacaccctatcctacactctttccctacacgacgctcttccgatctgctgatgctccctgtggcg

SEQ ID NO: 4856 - DNA, 96 bp, Artificial Sequence
  Description of Artificial Sequence: Synthetic primer
aatgatacggcgaccaccgagatctacaccctatcctacactctttccctacacgacgctcttccgatctcccaccataatgtcactcctactgag

SEQ ID NO: 4857 - DNA, 92 bp, Artificial Sequence
  Description of Artificial Sequence: Synthetic primer
aatgatacggcgaccaccgagatctacaccctatcctacactctttccctacacgacgctcttccgatctactcaggagggagctgatggga

SEQ ID NO: 4858 - DNA, 91 bp, Artificial Sequence
  Description of Artificial Sequence: Synthetic primer
aatgatacggcgaccaccgagatctacaccctatcctacactctttccctacacgacgctcttccgatctgggctttttctctctgtgccc

SEQ ID NO: 4859 - DNA, 95 bp, Artificial Sequence
  Description of Artificial Sequence: Synthetic primer
aatgatacggcgaccaccgagatctacaccctatcctacactctttccctacacgacgctcttccgatctttgtcttctctctgccaactccttt

SEQ ID NO: 4860 - DNA, 97 bp, Artificial Sequence
  Description of Artificial Sequence: Synthetic primer
aatgatacggcgaccaccgagatctacaccctatcctacactctttccctacacgacgctcttccgatctatatgctcaattaactgtgccatctca

SEQ ID NO: 4861 - DNA, 100 bp, Artificial Sequence
  Description of Artificial Sequence: Synthetic polynucleotide
aatgatacggcgaccaccgagatctacaccctatcctacactctttccctacacgacgctcttccgatctctgcagtcaaatataccaccactaaaatat

SEQ ID NO: 4862 - DNA, 98 bp, Artificial Sequence
  Description of Artificial Sequence: Synthetic primer
aatgatacggcgaccaccgagatctacaccctatcctacactctttccctacacgacgctcttccgatctaactgaagccataacaacagtcttctgt

SEQ ID NO: 4863 - DNA, 100 bp, Artificial Sequence
  Description of Artificial Sequence: Synthetic polynucleotide
aatgatacggcgaccaccgagatctacaccctatcctacactctttccctacacgacgctcttccgatctcagcattcaggaagaaagaggcatttaatg

SEQ ID NO: 4864 - DNA, 100 bp, Artificial Sequence
  Description of Artificial Sequence: Synthetic polynucleotide
aatgatacggcgaccaccgagatctacaccctatcctacactctttccctacacgacgctcttccgatcttccctgttttattctaggtgcttctccata

SEQ ID NO: 4865 - DNA, 100 bp, Artificial Sequence
  Description of Artificial Sequence: Synthetic polynucleotide
aatgatacggcgaccaccgagatctacaccctatcctacactctttccctacacgacgctcttccgatctcttcagatatttgctaatttgggttctgaa

SEQ ID NO: 4866 - DNA, 95 bp, Artificial Sequence
  Description of Artificial Sequence: Synthetic primer
aatgatacggcgaccaccgagatctacaccctatcctacactctttccctacacgacgctcttccgatctcctgtacttcatgtctatcaggcaa

SEQ ID NO: 4867 - DNA, 96 bp, Artificial Sequence
  Description of Artificial Sequence: Synthetic primer
aatgatacggcgaccaccgagatctacaccctatcctacactctttccctacacgacgctcttccgatctgccgagacctaatgcacacatgattc

SEQ ID NO: 4868 - DNA, 100 bp, Artificial Sequence; identical to SEQ ID NO: 4865
  Description of Artificial Sequence: Synthetic polynucleotide

SEQ ID NO: 4869 - DNA, 96 bp, Artificial Sequence; identical to SEQ ID NO: 4867
  Description of Artificial Sequence: Synthetic primer

SEQ ID NO: 4870 - DNA, 105 bp, Artificial Sequence
  Description of Artificial Sequence: Synthetic polynucleotide
aatgatacggcgaccaccgagatctacaccctatcctacactctttccctacacgacgctcttccgatcttagaaacatcacactaactcatggaaatactgatc

SEQ ID NO: 4871 - DNA, 99 bp, Artificial Sequence
  Description of Artificial Sequence: Synthetic primer
aatgatacggcgaccaccgagatctacaccctatcctacactctttccctacacgacgctcttccgatctaaggagtttgtttgttcctttgctttttt

SEQ ID NO: 4872 - DNA, 105 bp, Artificial Sequence
  Description of Artificial Sequence: Synthetic polynucleotide
aatgatacggcgaccaccgagatctacaccctatcctacactctttccctacacgacgctcttccgatctcatcactatattaaacgcttagtgaggaatatgag

SEQ ID NO: 4873 - DNA, 103 bp, Artificial Sequence
  Description of Artificial Sequence: Synthetic polynucleotide
aatgatacggcgaccaccgagatctacaccctatcctacactctttccctacacgacgctcttccgatctccatacctatgatttccctctttgtactgtatt

SEQ ID NO: 4874 - DNA, 97 bp, Artificial Sequence
  Description of Artificial Sequence: Synthetic primer
aatgatacggcgaccaccgagatctacaccctatcctacactctttccctacacgacgctcttccgatctgtctgttttcttgttgctgttgttgtt

SEQ ID NO: 4875 - DNA, 96 bp, Artificial Sequence
  Description of Artificial Sequence: Synthetic primer
aatgatacggcgaccaccgagatctacaccctatcctacactctttccctacacgacgctcttccgatctcaacagccaaacaacagtgtgtttat

SEQ ID NO: 4876 - DNA, 102 bp, Artificial Sequence
  Description of Artificial Sequence: Synthetic polynucleotide
aatgatacggcgaccaccgagatctacaccctatcctacactctttccctacacgacgctcttccgatctcaaaaagtataagtttccaactgttgatactc

SEQ ID NO: 4877 - DNA, 102 bp, Artificial Sequence
  Description of Artificial Sequence: Synthetic polynucleotide
aatgatacggcgaccaccgagatctacaccctatcctacactctttccctacacgacgctcttccgatctcagactacatcatcataaatgagaatgatcgt

SEQ ID NO: 4878 - DNA, 104 bp, Artificial Sequence
  Description of Artificial Sequence: Synthetic polynucleotide
aatgatacggcgaccaccgagatctacaccctatcctacactctttccctacacgacgctcttccgatctgtttgctgataccagaaccatttcaaaagttata

SEQ ID NO: 4879 - DNA, 99 bp, Artificial Sequence
  Description of Artificial Sequence: Synthetic primer
aatgatacggcgaccaccgagatctacaccctatcctacactctttccctacacgacgctcttccgatctgccaccatgttctctaatagcacaaatga

SEQ ID NO: 4880 - DNA, 102 bp, Artificial Sequence
  Description of Artificial Sequence: Synthetic polynucleotide
aatgatacggcgaccaccgagatctacaccctatcctacactctttccctacacgacgctcttccgatcttgagctgtaccaagttaaatcaccattcaata

SEQ ID NO: 4881 - DNA, 94 bp, Artificial Sequence
  Description of Artificial Sequence: Synthetic primer
aatgatacggcgaccaccgagatctacaccctatcctacactctttccctacacgacgctcttccgatctatggcctgggatttgttttttccc

SEQ ID NO: 4882 - DNA, 103 bp, Artificial Sequence
  Description of Artificial Sequence: Synthetic polynucleotide
aatgatacggcgaccaccgagatctacaccctatcctacactctttccctacacgacgctcttccgatctatcataatatgcgctgttatctctttcttatag

SEQ ID NO: 4883 - DNA, 100 bp, Artificial Sequence
  Description of Artificial Sequence: Synthetic polynucleotide
aatgatacggcgaccaccgagatctacaccctatcctacactctttccctacacgacgctcttccgatctcaattcaaaagttgtttttcccatcttcag

SEQ ID NO: 4884 - DNA, 95 bp, Artificial Sequence
  Description of Artificial Sequence: Synthetic primer
aatgatacggcgaccaccgagatctacaccctatcctacactctttccctacacgacgctcttccgatctagtccaatcacacaattaaagcggg

SEQ ID NO: 4885 - DNA, 103 bp, Artificial Sequence
  Description of Artificial Sequence: Synthetic polynucleotide
aatgatacggcgaccaccgagatctacaccctatcctacactctttccctacacgacgctcttccgatctctaaatcaaatgaccatttacagtaagttgacc

SEQ ID NO: 4886 - DNA, 98 bp, Artificial Sequence
  Description of Artificial Sequence: Synthetic primer
aatgatacggcgaccaccgagatctacaccctatcctacactctttccctacacgacgctcttccgatctttatatgctgtgctttggaagttcagtc

SEQ ID NO: 4887 - DNA, 103 bp, Artificial Sequence
  Description of Artificial Sequence: Synthetic polynucleotide
aatgatacggcgaccaccgagatctacaccctatcctacactctttccctacacgacgctcttccgatctctctctcatgttctgttttttcaatttacttgc

SEQ ID NO: 4888 - DNA, 100 bp, Artificial Sequence
  Description of Artificial Sequence: Synthetic polynucleotide
aatgatacggcgaccaccgagatctacaccctatcctacactctttccctacacgacgctcttccgatcttgtctttttattacccagagatacccagaa

SEQ ID NO: 4889 - DNA, 105 bp, Artificial Sequence
  Description of Artificial Sequence: Synthetic polynucleotide
aatgatacggcgaccaccgagatctacaccctatcctacactctttccctacacgacgctcttccgatctggaacctgaaaaatgaccaacttttctagtaaata

SEQ ID NO: 4890 - DNA, 94 bp, Artificial Sequence
  Description of Artificial Sequence: Synthetic primer
aatgatacggcgaccaccgagatctacaccctatcctacactctttccctacacgacgctcttccgatcttagaaatagcctcacagtctggca

SEQ ID NO: 4891 - DNA, 99 bp, Artificial Sequence
  Description of Artificial Sequence: Synthetic primer
aatgatacggcgaccaccgagatctacaccctatcctacactctttccctacacgacgctcttccgatctggaaggtgtttcctattaggtctaactca

SEQ ID NO: 4892 - DNA, 91 bp, Artificial Sequence
  Description of Artificial Sequence: Synthetic primer
aatgatacggcgaccaccgagatctacaccctatcctacactctttccctacacgacgctcttccgatctagaaagaaccggctcccgagt

SEQ ID NO: 4893 - DNA, 88 bp, Artificial Sequence
  Description of Artificial Sequence: Synthetic primer
aatgatacggcgaccaccgagatctacaccctatcctacactctttccctacacgacgctcttccgatctaccagatcggagcctggc

SEQ ID NO: 4894 - DNA, 103 bp, Artificial Sequence
  Description of Artificial Sequence: Synthetic polynucleotide
aatgatacggcgaccaccgagatctacaccctatcctacactctttccctacacgacgctcttccgatcttctaagtaccctgagaaataatccaattacctg

SEQ ID NO: 4895 - DNA, 93 bp, Artificial Sequence
  Description of Artificial Sequence: Synthetic primer
aatgatacggcgaccaccgagatctacaccctatcctacactctttccctacacgacgctcttccgatctaggctgagagggtgtcacatacc

SEQ ID NO: 4896 - DNA, 102 bp, Artificial Sequence
  Description of Artificial Sequence: Synthetic polynucleotide
aatgatacggcgaccaccgagatctacaccctatcctacactctttccctacacgacgctcttccgatctgaggaacttagaagaaaaacttcataacatac

SEQ ID NO: 4897 - DNA, 103 bp, Artificial Sequence
  Description of Artificial Sequence: Synthetic polynucleotide
aatgatacggcgaccaccgagatctacaccctatcctacactctttccctacacgacgctcttccgatctgaagcaacagcctttggattatatctaaaattc

SEQ ID NO: 4898 - DNA, 91 bp, Artificial Sequence
  Description of Artificial Sequence: Synthetic primer
aatgatacggcgaccaccgagatctacaccctatcctacactctttccctacacgacgctcttccgatctggctcctctccctgaccgtac

SEQ ID NO: 4899 - DNA, 91 bp, Artificial Sequence
  Description of Artificial Sequence: Synthetic primer
aatgatacggcgaccaccgagatctacaccctatcctacactctttccctacacgacgctcttccgatctgggacacaccaggctactcac

SEQ ID NO: 4900 - DNA, 92 bp, Artificial Sequence
  Description of Artificial Sequence: Synthetic primer
aatgatacggcgaccaccgagatctacaccctatcctacactctttccctacacgacgctcttccgatcttccaaggtgaaggaaaccaggc

SEQ ID NO: 4901 - DNA, 93 bp, Artificial Sequence
  Description of Artificial Sequence: Synthetic primer
aatgatacggcgaccaccgagatctacaccctatcctacactctttccctacacgacgctcttccgatctgcttccagagaacaaggagccaa

SEQ ID NO: 4902 - DNA, 105 bp, Artificial Sequence
  Description of Artificial Sequence: Synthetic polynucleotide
aatgatacggcgaccaccgagatctacaccctatcctacactctttccctacacgacgctcttccgatctaagaacaaatgaataaacaggtactgtaagaatcc

SEQ ID NO: 4903 - DNA, 93 bp, Artificial Sequence
  Description of Artificial Sequence: Synthetic primer
aatgatacggcgaccaccgagatctacaccctatcctacactctttccctacacgacgctcttccgatctctcgctctttgttgcttcccaaa

SEQ ID NO: 4904 - DNA, 90 bp, Artificial Sequence
  Description of Artificial Sequence: Synthetic primer
aatgatacggcgaccaccgagatctacaccctatcctacactctttccctacacgacgctcttccgatctctactgtgactccaggcccg

SEQ ID NO: 4905 - DNA, 91 bp, Artificial Sequence
  Description of Artificial Sequence: Synthetic primer
aatgatacggcgaccaccgagatctacaccctatcctacactctttccctacacgacgctcttccgatctcctgtcttgtctcctccaccg

SEQ ID NO: 4906 - DNA, 92 bp, Artificial Sequence
  Description of Artificial Sequence: Synthetic primer
aatgatacggcgaccaccgagatctacaccctatcctacactctttccctacacgacgctcttccgatctccaccctctgttctcctccaca

SEQ ID NO: 4907 - DNA, 92 bp, Artificial Sequence
  Description of Artificial Sequence: Synthetic primer
aatgatacggcgaccaccgagatctacaccctatcctacactctttccctacacgacgctcttccgatcttcacctccatctctctccctgt

SEQ ID NO: 4908 - DNA, 92 bp, Artificial Sequence
  Description of Artificial Sequence: Synthetic primer
aatgatacggcgaccaccgagatctacaccctatcctacactctttccctacacgacgctcttccgatctcctctgggctctttcctccctg

SEQ ID NO: 4909 - DNA, 92 bp, Artificial Sequence
  Description of Artificial Sequence: Synthetic primer
aatgatacggcgaccaccgagatctacaccctatcctacactctttccctacacgacgctcttccgatctcctccaacatcctcgtgaactc

SEQ ID NO: 4910 - DNA, 89 bp, Artificial Sequence
  Description of Artificial Sequence: Synthetic primer
aatgatacggcgaccaccgagatctacaccctatcctacactctttccctacacgacgctcttccgatctaggagctaagccctggtgg

SEQ ID NO: 4911 - DNA, 90 bp, Artificial Sequence
  Description of Artificial Sequence: Synthetic primer
aatgatacggcgaccaccgagatctacaccctatcctacactctttccctacacgacgctcttccgatctgcctgcactcactccttgtg

SEQ ID NO: 4912 - DNA, 90 bp, Artificial Sequence
  Description of Artificial Sequence: Synthetic primer
aatgatacggcgaccaccgagatctacaccctatcctacactctttccctacacgacgctcttccgatctttcatcccgttttcgggcac

SEQ ID NO: 4913 - DNA, 92 bp, Artificial Sequence
  Description of Artificial Sequence: Synthetic primer
aatgatacggcgaccaccgagatctacaccctatcctacactctttccctacacgacgctcttccgatcttggtcaccaaagtccagcacag

SEQ ID NO: 4914 - DNA, 92 bp, Artificial Sequence
  Description of Artificial Sequence: Synthetic primer
aatgatacggcgaccaccgagatctacaccctatcctacactctttccctacacgacgctcttccgatctgcaaacggccagatggagtctc

SEQ ID NO: 4915 - DNA, 90 bp, Artificial Sequence
  Description of Artificial Sequence: Synthetic primer
aatgatacggcgaccaccgagatctacaccctatcctacactctttccctacacgacgctcttccgatctgcctccgagtgagtgggcag

SEQ ID NO: 4916 - DNA, 88 bp, Artificial Sequence
  Description of Artificial Sequence: Synthetic primer
aatgatacggcgaccaccgagatctacaccctatcctacactctttccctacacgacgctcttccgatctagccttcttcgggcctcg

SEQ ID NO: 4917 - DNA, 101 bp, Artificial Sequence
  Description of Artificial Sequence: Synthetic polynucleotide
aatgatacggcgaccaccgagatctacaccctatcctacactctttccctacacgacgctcttccgatctgaagaaaaagaagtcaaagacaaagtgtgta

SEQ ID NO: 4918 - DNA, 104 bp, Artificial Sequence
  Description of Artificial Sequence: Synthetic polynucleotide
aatgatacggcgaccaccgagatctacaccctatcctacactctttccctacacgacgctcttccgatctgcctgaagagaaacataaagaatcctttcttaat

SEQ ID NO: 4919 - DNA, 99 bp, Artificial Sequence
  Description of Artificial Sequence: Synthetic primer
aatgatacggcgaccaccgagatctacaccctatcctacactctttccctacacgacgctcttccgatctgctttcccagtaaattactcttaccaatg

SEQ ID NO: 4920 - DNA, 104 bp, Artificial Sequence
  Description of Artificial Sequence: Synthetic polynucleotide
aatgatacggcgaccaccgagatctacaccctatcctacactctttccctacacgacgctcttccgatctggacaggttttgaaagatatttgtgttactaatg

SEQ ID NO: 4921 - DNA, 100 bp, Artificial Sequence
  Description of Artificial Sequence: Synthetic polynucleotide
aatgatacggcgaccaccgagatctacaccctatcctacactctttccctacacgacgctcttccgatctgtaataatccagactgtgtttctcccttct

SEQ ID NO: 4922 - DNA, 105 bp, Artificial Sequence
  Description of Artificial Sequence: Synthetic polynucleotide
aatgatacggcgaccaccgagatctacaccctatcctacactctttccctacacgacgctcttccgatcttggagtatttgatagtgtattaaccttatgtgtga

SEQ ID NO: 4923 - DNA, 102 bp, Artificial Sequence
  Description of Artificial Sequence: Synthetic polynucleotide
aatgatacggcgaccaccgagatctacaccctatcctacactctttccctacacgacgctcttccgatctccttacccataacaactttgactgttaaatgt

SEQ ID NO: 4924 - DNA, 95 bp, Artificial Sequence
  Description of Artificial Sequence: Synthetic primer
aatgatacggcgaccaccgagatctacaccctatcctacactctttccctacacgacgctcttccgatcttctgctctcactactgcaaaacctt

SEQ ID NO: 4925 - DNA, 97 bp, Artificial Sequence
  Description of Artificial Sequence: Synthetic primer
aatgatacggcgaccaccgagatctacaccctatcctacactctttccctacacgacgctcttccgatctagttgatggtgtgtagtcatttacctt

SEQ ID NO: 4926 - DNA, 101 bp, Artificial Sequence
  Description of Artificial Sequence: Synthetic polynucleotide
aatgatacggcgaccaccgagatctacaccctatcctacactctttccctacacgacgctcttccgatctccagataccattttcagtcttttctctcttt

SEQ ID NO: 4927 - DNA, 102 bp, Artificial Sequence
  Description of Artificial Sequence: Synthetic polynucleotide
aatgatacggcgaccaccgagatctacaccctatcctacactctttccctacacgacgctcttccgatcttgaaaggttagaatttctaagaagttatcctg

SEQ ID NO: 4928 - DNA, 97 bp, Artificial Sequence
  Description of Artificial Sequence: Synthetic primer
aatgatacggcgaccaccgagatctacaccctatcctacactctttccctacacgacgctcttccgatctgtgttttaccttaacctgtgcaaacag

SEQ ID NO: 4929 - DNA, 101 bp, Artificial Sequence
  Description of Artificial Sequence: Synthetic polynucleotide
aatgatacggcgaccaccgagatctacaccctatcctacactctttccctacacgacgctcttccgatctgtttttaatgccatctctctctctctttttt

SEQ ID NO: 4930 - DNA, 89 bp, Artificial Sequence
  Description of Artificial Sequence: Synthetic primer
aatgatacggcgaccaccgagatctacaccctatcctacactctttccctacacgacgctcttccgatctgggcgacaagagctgagcg

SEQ ID NO: 4931 - DNA, 91 bp, Artificial Sequence
  Description of Artificial Sequence: Synthetic primer
aatgatacggcgaccaccgagatctacaccctatcctacactctttccctacacgacgctcttccgatctacaggcccagtcttgtactca

SEQ ID NO: 4932 - DNA, 95 bp, Artificial Sequence
  Description of Artificial Sequence: Synthetic primer
aatgatacggcgaccaccgagatctacaccctatcctacactctttccctacacgacgctcttccgatctcaaaggcatggacatacttaatggg

SEQ ID NO: 4933 - DNA, 105 bp, Artificial Sequence
  Description of Artificial Sequence: Synthetic polynucleotide
aatgatacggcgaccaccgagatctacaccctatcctacactctttccctacacgacgctcttccgatctgagactgatacttatttctaatttatacctcacag

SEQ ID NO: 4934 - DNA, 96 bp, Artificial Sequence
  Description of Artificial Sequence: Synthetic primer
aatgatacggcgaccaccgagatctacaccctatcctacactctttccctacacgacgctcttccgatctacaataccagatagaacagacacagc

SEQ ID NO: 4935 - DNA, 94 bp, Artificial Sequence
  Description of Artificial Sequence: Synthetic primer
aatgatacggcgaccaccgagatctacaccctatcctacactctttccctacacgacgctcttccgatctaaccacgtctatggaaattccctg

SEQ ID NO: 4936 - DNA, 96 bp, Artificial Sequence
  Description of Artificial Sequence: Synthetic primer
aatgatacggcgaccaccgagatctacaccctatcctacactctttccctacacgacgctcttccgatctacaaaaaacaaaccaaaccaaaccaa

SEQ ID NO: 4937 - DNA, 98 bp, Artificial Sequence
  Description of Artificial Sequence: Synthetic primer
aatgatacggcgaccaccgagatctacaccctatcctacactctttccctacacgacgctcttccgatctaaaacaaaacctattttccaagcacacc

SEQ ID NO: 4938 - DNA, 93 bp, Artificial Sequence
  Description of Artificial Sequence: Synthetic primer
aatgatacggcgaccaccgagatctacaccctatcctacactctttccctacacgacgctcttccgatcttactgtattgtgttgtcccgtgg

SEQ ID NO: 4939 - DNA, 105 bp, Artificial Sequence
  Description of Artificial Sequence: Synthetic polynucleotide
aatgatacggcgaccaccgagatctacaccctatcctacactctttccctacacgacgctcttccgatctcacacaaaacaatctgcttaatttttaaggtacag

SEQ ID NO: 4940 - DNA, 104 bp, Artificial Sequence
  Description of Artificial Sequence: Synthetic polynucleotide
aatgatacggcgaccaccgagatctacaccctatcctacactctttccctacacgacgctcttccgatcttcttgactattctacagcaaaatcatccttgtat

SEQ ID NO: 4941 - DNA, 94 bp, Artificial Sequence
  Description of Artificial Sequence: Synthetic primer
aatgatacggcgaccaccgagatctacaccctatcctacactctttccctacacgacgctcttccgatctatggttagaggcaaagatgcagag

SEQ ID NO: 4942 - DNA, 101 bp, Artificial Sequence
  Description of Artificial Sequence: Synthetic polynucleotide
aatgatacggcgaccaccgagatctacaccctatcctacactctttccctacacgacgctcttccgatcttaagtttgagctgatgatttaagacagtgtt

SEQ ID NO: 4943 - DNA, 94 bp, Artificial Sequence
  Description of Artificial Sequence: Synthetic primer
aatgatacggcgaccaccgagatctacaccctatcctacactctttccctacacgacgctcttccgatctatgagaggaatgcaggaatcccac

SEQ ID NO: 4944 - DNA, 95 bp, Artificial Sequence
  Description of Artificial Sequence: Synthetic primer
aatgatacggcgaccaccgagatctacaccctatcctacactctttccctacacgacgctcttccgatctctttctctttttcagccacaggaaa

SEQ ID NO: 4945 - DNA, 97 bp, Artificial Sequence
  Description of Artificial Sequence: Synthetic primer
aatgatacggcgaccaccgagatctacaccctatcctacactctttccctacacgacgctcttccgatctaatgtcacaacccactgaggtatatgt

SEQ ID NO: 4946 - DNA, 100 bp, Artificial Sequence
  Description of Artificial Sequence: Synthetic polynucleotide
aatgatacggcgaccaccgagatctacaccctatcctacactctttccctacacgacgctcttccgatctaaatcgtatttaacaaaaagctgagtggaa

SEQ ID NO: 4947 - DNA, 100 bp, Artificial Sequence
  Description of Artificial Sequence: Synthetic polynucleotide
aatgatacggcgaccaccgagatctacaccctatcctacactctttccctacacgacgctcttccgatctgcccataatttcagtggtagctgatttttc

SEQ ID NO: 4948 - DNA, 92 bp, Artificial Sequence
  Description of Artificial Sequence: Synthetic primer
aatgatacggcgaccaccgagatctacaccctatcctacactctttccctacacgacgctcttccgatcttgaagggatggctggcttacag

SEQ ID NO: 4949 - DNA, 97 bp, Artificial Sequence
  Description of Artificial Sequence: Synthetic primer
aatgatacggcgaccaccgagatctacaccctatcctacactctttccctacacgacgctcttccgatctagattcctccttgtcacttaatttgga

SEQ ID NO: 4950 - DNA, 105 bp, Artificial Sequence
  Description of Artificial Sequence: Synthetic polynucleotide
aatgatacggcgaccaccgagatctacaccctatcctacactctttccctacacgacgctcttccgatctaaagtaaaagaggagaaactcagagataaccaata

SEQ ID NO: 4951 - DNA, 100 bp, Artificial Sequence
  Description of Artificial Sequence: Synthetic polynucleotide
aatgatacggcgaccaccgagatctacaccctatcctacactctttccctacacgacgctcttccgatctgcatttctgtaaaagtaaagaacgtaagag

SEQ ID NO: 4952 - DNA, 97 bp, Artificial Sequence
  Description of Artificial Sequence: Synthetic primer
aatgatacggcgaccaccgagatctacaccctatcctacactctttccctacacgacgctcttccgatctaaaaaccattggacaaagtgtggactg

SEQ ID NO: 4953 - DNA, 89 bp, Artificial Sequence
  Description of Artificial Sequence: Synthetic primer
aatgatacggcgaccaccgagatctacaccctatcctacactctttccctacacgacgctcttccgatctggctcgactccctccgtac

SEQ ID NO: 4954 - DNA, 99 bp, Artificial Sequence
  Description of Artificial Sequence: Synthetic primer
aatgatacggcgaccaccgagatctacaccctatcctacactctttccctacacgacgctcttccgatctcatcctgctactttgaggttttacttacc

SEQ ID NO: 4955 - DNA, 96 bp, Artificial Sequence
  Description of Artificial Sequence: Synthetic primer
aatgatacggcgaccaccgagatctacaccctatcctacactctttccctacacgacgctcttccgatctaaatgacagacaatgtcatcacagga

SEQ ID NO: 4956 - DNA, 100 bp, Artificial Sequence
  Description of Artificial Sequence: Synthetic polynucleotide
aatgatacggcgaccaccgagatctacaccctatcctacactctttccctacacgacgctcttccgatctcctaggcaaaaaatacatttcagaatgaat

SEQ ID NO: 4957 - DNA, 101 bp, Artificial Sequence
  Description of Artificial Sequence: Synthetic polynucleotide
aatgatacggcgaccaccgagatctacaccctatcctacactctttccctacacgacgctcttccgatctacaatttactctcccatgtaccattcttacc

SEQ ID NO: 4958 - DNA, 101 bp, Artificial Sequence
  Description of Artificial Sequence: Synthetic polynucleotide
aatgatacggcgaccaccgagatctacaccctatcctacactctttccctacacgacgctcttccgatctgcactagaacacattactttgatgacaaatc

SEQ ID NO: 4959 - DNA, 101 bp, Artificial Sequence
  Description of Artificial Sequence: Synthetic polynucleotide
aatgatacggcgaccaccgagatctacaccctatcctacactctttccctacacgacgctcttccgatctaaccttatctccaccagcaaactattaaaaa

SEQ ID NO: 4960 - DNA, 101 bp, Artificial Sequence
  Description of Artificial Sequence: Synthetic polynucleotide
aatgatacggcgaccaccgagatctacaccctatcctacactctttccctacacgacgctcttccgatctccaaaataatgtgatggaatgataaaccaag

SEQ ID NO: 4961 - DNA, 95 bp, Artificial Sequence
  Description of Artificial Sequence: Synthetic primer
aatgatacggcgaccaccgagatctacaccctatcctacactctttccctacacgacgctcttccgatctgggtgtttcctgtgagtggatttcc

SEQ ID NO: 4962 - DNA, 98 bp, Artificial Sequence
  Description of Artificial Sequence: Synthetic primer
aatgatacggcgaccaccgagatctacaccctatcctacactctttccctacacgacgctcttccgatctagcctgatagaacatctgttccttgtga

SEQ ID NO: 4963 - DNA, 93 bp, Artificial Sequence
  Description of Artificial Sequence: Synthetic primer
aatgatacggcgaccaccgagatctacaccctatcctacactctttccctacacgacgctcttccgatctgaagtagctggatgagaagcgcc

SEQ ID NO: 4964 - DNA, 99 bp, Artificial Sequence
  Description of Artificial Sequence: Synthetic primer
aatgatacggcgaccaccgagatctacaccctatcctacactctttccctacacgacgctcttccgatctggcatagaccttatcactacttccagaag

SEQ ID NO: 4965 - DNA, 103 bp, Artificial Sequence
  Description of Artificial Sequence: Synthetic polynucleotide
aatgatacggcgaccaccgagatctacaccctatcctacactctttccctacacgacgctcttccgatctttattacagaataaaggaggtaggctgtacttt

SEQ ID NO: 4966 - DNA, 92 bp, Artificial Sequence
  Description of Artificial Sequence: Synthetic primer
aatgatacggcgaccaccgagatctacaccctatcctacactctttccctacacgacgctcttccgatctaaccttggcagttgaggcccta

SEQ ID NO: 4967 - DNA, 96 bp, Artificial Sequence
  Description of Artificial Sequence: Synthetic primer
aatgatacggcgaccaccgagatctacaccctatcctacactctttccctacacgacgctcttccgatcttagtagctctgcttgttcacacactc

SEQ ID NO: 4968 - DNA, 105 bp, Artificial Sequence
  Description of Artificial Sequence: Synthetic polynucleotide
aatgatacggcgaccaccgagatctacaccctatcctacactctttccctacacgacgctcttccgatctatattagtggagagctactattttcagaaacgatc

SEQ ID NO: 4969 - DNA, 100 bp, Artificial Sequence
  Description of Artificial Sequence: Synthetic polynucleotide
aatgatacggcgaccaccgagatctacaccctatcctacactctttccctacacgacgctcttccgatctacaacagaagtataagaatggctgtcacac

SEQ ID NO: 4970 - DNA, 98 bp, Artificial Sequence
  Description of Artificial Sequence: Synthetic primer
aatgatacggcgaccaccgagatctacaccctatcctacactctttccctacacgacgctcttccgatcttttatcattccagatcaaagggtggtca

SEQ ID NO: 4971 - DNA, 98 bp, Artificial Sequence
  Description of Artificial Sequence: Synthetic primer
aatgatacggcgaccaccgagatctacaccctatcctacactctttccctacacgacgctcttccgatcttctcctaaagattgtatgaggtcctgtc

SEQ ID NO: 4972 - DNA, 100 bp, Artificial Sequence
  Description of Artificial Sequence: Synthetic polynucleotide
aatgatacggcgaccaccgagatctacaccctatcctacactctttccctacacgacgctcttccgatctcactttgtatcggaatacagagaaagaaga

SEQ ID NO: 4973 - DNA, 89 bp, Artificial Sequence
  Description of Artificial Sequence: Synthetic primer
aatgatacggcgaccaccgagatctacaccctatcctacactctttccctacacgacgctcttccgatctctgcatcacctcccagggc

SEQ ID NO: 4974 - DNA, 94 bp, Artificial Sequence
  Description of Artificial Sequence: Synthetic primer
aatgatacggcgaccaccgagatctacaccctatcctacactctttccctacacgacgctcttccgatctcagctaagtgcagggacagataca

SEQ ID NO: 4975 - DNA, 91 bp, Artificial Sequence
  Description of Artificial Sequence: Synthetic primer
aatgatacggcgaccaccgagatctacaccctatcctacactctttccctacacgacgctcttccgatctagggtgacaggaggatggctc

SEQ ID NO: 4976 - DNA, 90 bp, Artificial Sequence
  Description of Artificial Sequence: Synthetic primer
aatgatacggcgaccaccgagatctacaccctatcctacactctttccctacacgacgctcttccgatctagcggagttcgtacctcagg

SEQ ID NO: 4977 - DNA, 95 bp, Artificial Sequence
  Description of Artificial Sequence: Synthetic primer
aatgatacggcgaccaccgagatctacaccctatcctacactctttccctacacgacgctcttccgatctttgaaggtaggagataagaggtggg

SEQ ID NO: 4978 - DNA, 97 bp, Artificial Sequence
  Description of Artificial Sequence: Synthetic primer
aatgatacggcgaccaccgagatctacaccctatcctacactctttccctacacgacgctcttccgatctcatctccctattcctttgttgactcac

SEQ ID NO: 4979 - DNA, 94 bp, Artificial Sequence
  Description of Artificial Sequence: Synthetic primer
aatgatacggcgaccaccgagatctacaccctatcctacactctttccctacacgacgctcttccgatctaacctcaatcagcagttcagctct

SEQ ID NO: 4980 - DNA, 92 bp, Artificial Sequence
  Description of Artificial Sequence: Synthetic primer
aatgatacggcgaccaccgagatctacaccctatcctacactctttccctacacgacgctcttccgatctagcccaggtagctgtgaacagt

SEQ ID NO: 4981 - DNA, 95 bp, Artificial Sequence
  Description of Artificial Sequence: Synthetic primer
aatgatacggcgaccaccgagatctacaccctatcctacactctttccctacacgacgctcttccgatctgtgggcatttgttgcttgaccatac

SEQ ID NO: 4982 - DNA, 92 bp, Artificial Sequence
  Description of Artificial Sequence: Synthetic primer
aatgatacggcgaccaccgagatctacaccctatcctacactctttccctacacgacgctcttccgatctctagttgggtccgaccacgagc

SEQ ID NO: 4983 - DNA, 89 bp, Artificial Sequence
  Description of Artificial Sequence: Synthetic primer
aatgatacggcgaccaccgagatctacaccctatcctacactctttccctacacgacgctcttccgatctggtccaccgccagtctcct

SEQ ID NO: 4984 - DNA, 91 bp, Artificial Sequence
  Description of Artificial Sequence: Synthetic primer
aatgatacggcgaccaccgagatctacaccctatcctacactctttccctacacgacgctcttccgatctactggtagggcaaggaccttg

SEQ ID NO: 4985 - DNA, 91 bp, Artificial Sequence
  Description of Artificial Sequence: Synthetic primer
aatgatacggcgaccaccgagatctacaccctatcctacactctttccctacacgacgctcttccgatctccagggaactgggagtgagga

SEQ ID NO: 4986 - DNA, 88 bp, Artificial Sequence
  Description of Artificial Sequence: Synthetic primer
aatgatacggcgaccaccgagatctacaccctatcctacactctttccctacacgacgctcttccgatctgttgcagccggattcccg

SEQ ID NO: 4987 - DNA, 102 bp, Artificial Sequence
  Description of Artificial Sequence: Synthetic polynucleotide
aatgatacggcgaccaccgagatctacaccctatcctacactctttccctacacgacgctcttccgatctaaactaaaaggctgaaatcaagtagggttaag

SEQ ID NO: 4988 - DNA, 103 bp, Artificial Sequence
  Description of Artificial Sequence: Synthetic polynucleotide
aatgatacggcgaccaccgagatctacaccctatcctacactctttccctacacgacgctcttccgatctccttaaaacagaattaaaccttgacacaacatc

SEQ ID NO: 4989 - DNA, 103 bp, Artificial Sequence
  Description of Artificial Sequence: Synthetic polynucleotide
aatgatacggcgaccaccgagatctacaccctatcctacactctttccctacacgacgctcttccgatctactgcactaaagaggacaaactaagtagtataa

SEQ ID NO: 4990 - DNA, 94 bp, Artificial Sequence
  Description of Artificial Sequence: Synthetic primer
aatgatacggcgaccaccgagatctacaccctatcctacactctttccctacacgacgctcttccgatctgcagaccgctttccagatatactt

SEQ ID NO: 4991 - DNA, 99 bp, Artificial Sequence
  Description of Artificial Sequence: Synthetic primer
aatgatacggcgaccaccgagatctacaccctatcctacactctttccctacacgacgctcttccgatcttcaaattcctttttttgtcaagattccgg

SEQ ID NO: 4992 - DNA, 103 bp, Artificial Sequence
  Description of Artificial Sequence: Synthetic polynucleotide
aatgatacggcgaccaccgagatctacaccctatcctacactctttccctacacgacgctcttccgatctcatttctattgttagtttaacaaccttgtagca

SEQ ID NO: 4993 - DNA, 94 bp, Artificial Sequence
  Description of Artificial Sequence: Synthetic primer
aatgatacggcgaccaccgagatctacaccctatcctacactctttccctacacgacgctcttccgatctcccaactagatcaatgagacccac

SEQ ID NO: 4994 - DNA, 94 bp, Artificial Sequence
  Description of Artificial Sequence: Synthetic primer
aatgatacggcgaccaccgagatctacaccctatcctacactctttccctacacgacgctcttccgatctcaagtctatgcaaaccagacacgt

SEQ ID NO: 4995 - DNA, 92 bp, Artificial Sequence
  Description of Artificial Sequence: Synthetic primer
aatgatacggcgaccaccgagatctacaccctatcctacactctttccctacacgacgctcttccgatctacatgtagtgcccaggactgtt

SEQ ID NO: 4996 - DNA, 99 bp, Artificial Sequence
  Description of Artificial Sequence: Synthetic primer
aatgatacggcgaccaccgagatctacaccctatcctacactctttccctacacgacgctcttccgatctacaaaaaaacttggatttaatcatgtccc

SEQ ID NO: 4997 - DNA, 101 bp, Artificial Sequence
  Description of Artificial Sequence: Synthetic polynucleotide
aatgatacggcgaccaccgagatctacaccctatcctacactctttccctacacgacgctcttccgatcttcaactgttacagaaatgaaataagacggaa

SEQ ID NO: 4998 - DNA, 100 bp, Artificial Sequence
  Description of Artificial Sequence: Synthetic polynucleotide
aatgatacggcgaccaccgagatctacaccctatcctacactctttccctacacgacgctcttccgatctatctgtgtaaacctttgaagaagctcaaat

SEQ ID NO: 4999 - DNA, 97 bp, Artificial Sequence
  Description of Artificial Sequence: Synthetic primer
aatgatacggcgaccaccgagatctacaccctatcctacactctttccctacacgacgctcttccgatctattgccaggaagagagtgaaatgtttt

SEQ ID NO: 5000 - DNA, 99 bp, Artificial Sequence
  Description of Artificial Sequence: Synthetic primer
aatgatacggcgaccaccgagatctacaccctatcctacactctttccctacacgacgctcttccgatctatatttgagaaaaacagggcacccattga

SEQ ID NO: 5001 - DNA, 94 bp, Artificial Sequence
  Description of Artificial Sequence: Synthetic primer
aatgatacggcgaccaccgagatctacaccctatcctacactctttccctacacgacgctcttccgatctaccaacagtggctttttggtgttt

SEQ ID NO: 5002 - DNA, 102 bp, Artificial Sequence
  Description of Artificial Sequence: Synthetic polynucleotide
aatgatacggcgaccaccgagatctacaccctatcctacactctttccctacacgacgctcttccgatctgcatgtttcaatactctttatttctctcccta

SEQ ID NO: 5003 - DNA, 95 bp, Artificial Sequence
  Description of Artificial Sequence: Synthetic primer
aatgatacggcgaccaccgagatctacaccctatcctacactctttccctacacgacgctcttccgatctgttagtaactcctgtggtgagtggc

SEQ ID NO: 5004 - DNA, 97 bp, Artificial Sequence
  Description of Artificial Sequence: Synthetic primer
aatgatacggcgaccaccgagatctacaccctatcctacactctttccctacacgacgctcttccgatctctggctccaggtaaagaaaataaacat

SEQ ID NO: 5005 - DNA, 96 bp, Artificial Sequence
  Description of Artificial Sequence: Synthetic primer
aatgatacggcgaccaccgagatctacaccctatcctacactctttccctacacgacgctcttccgatctctccctgatctgtcttctgtttctca

SEQ ID NO: 5006 - DNA, 95 bp, Artificial Sequence
  Description of Artificial Sequence: Synthetic primer
aatgatacggcgaccaccgagatctacaccctatcctacactctttccctacacgacgctcttccgatctccagaaccgtagttcacatgcactc

SEQ ID NO: 5007 - DNA, 96 bp, Artificial Sequence
  Description of Artificial Sequence: Synthetic primer
aatgatacggcgaccaccgagatctacaccctatcctacactctttccctacacgacgctcttccgatcttaggctgctctcttactgaacagttg

SEQ ID NO: 5008 - DNA, 98 bp, Artificial Sequence
  Description of Artificial Sequence: Synthetic primer
aatgatacggcgaccaccgagatctacaccctatcctacactctttccctacacgacgctcttccgatctatactctctttacggtacactaaccctg

SEQ ID NO: 5009 - DNA, 91 bp, Artificial Sequence
  Description of Artificial Sequence: Synthetic primer
aatgatacggcgaccaccgagatctacaccctatcctacactctttccctacacgacgctcttccgatctcactcaccgctcccactgttc

SEQ ID NO: 5010 - DNA, 90 bp, Artificial Sequence
  Description of Artificial Sequence: Synthetic primer
aatgatacggcgaccaccgagatctacaccctatcctacactctttccctacacgacgctcttccgatctcttctgatgtgccgggacct

SEQ ID NO: 5011 - DNA, 98 bp, Artificial Sequence
  Description of Artificial Sequence: Synthetic primer
aatgatacggcgaccaccgagatctacaccctatcctacactctttccctacacgacgctcttccgatctcctgggttggttgagactttgataactt

SEQ ID NO: 5012 - DNA, 92 bp, Artificial Sequence
  Description of Artificial Sequence: Synthetic primer
aatgatacggcgaccaccgagatctacaccctatcctacactctttccctacacgacgctcttccgatctctctggcatgagatgtggcatg

SEQ ID NO: 5013 - DNA, 100 bp, Artificial Sequence
  Description of Artificial Sequence: Synthetic polynucleotide
aatgatacggcgaccaccgagatctacaccctatcctacactctttccctacacgacgctcttccgatctcccaacccacatttcctttatagatgtttc

SEQ ID NO: 5014 - DNA, 101 bp, Artificial Sequence
  Description of Artificial Sequence: Synthetic polynucleotide
aatgatacggcgaccaccgagatctacaccctatcctacactctttccctacacgacgctcttccgatcttgctacatactgtgtctttttgaataccagg

SEQ ID NO: 5015 - DNA, 92 bp, Artificial Sequence
  Description of Artificial Sequence: Synthetic primer
aatgatacggcgaccaccgagatctacaccctatcctacactctttccctacacgacgctcttccgatctcaggcaggcaaaaactgggaaa

SEQ ID NO: 5016 - DNA, 93 bp, Artificial Sequence
  Description of Artificial Sequence: Synthetic primer
aatgatacggcgaccaccgagatctacaccctatcctacactctttccctacacgacgctcttccgatctgatgagaaagcagaggcaagagt

SEQ ID NO: 5017 - DNA, 92 bp, Artificial Sequence
  Description of Artificial Sequence: Synthetic primer
aatgatacggcgaccaccgagatctacaccctatcctacactctttccctacacgacgctcttccgatctgtcacagctccagtgtctgtcc

SEQ ID NO: 5018 - DNA, 93 bp, Artificial Sequence
  Description of Artificial Sequence: Synthetic primer
aatgatacggcgaccaccgagatctacaccctatcctacactctttccctacacgacgctcttccgatctcttaggagggctgttttgaggag

SEQ ID NO: 5019 - DNA, 94 bp, Artificial Sequence
  Description of Artificial Sequence: Synthetic primer
aatgatacggcgaccaccgagatctacaccctatcctacactctttccctacacgacgctcttccgatctcaagtggctctctgtgcctttgtc

SEQ ID NO: 5020 - DNA, 100 bp, Artificial Sequence
  Description of Artificial Sequence: Synthetic polynucleotide
aatgatacggcgaccaccgagatctacaccctatcctacactctttccctacacgacgctcttccgatcttaaggctcttgctcataaaactttagtgtt

SEQ ID NO: 5021 - DNA, 103 bp, Artificial Sequence
  Description of Artificial Sequence: Synthetic polynucleotide
aatgatacggcgaccaccgagatctacaccctatcctacactctttccctacacgacgctcttccgatctcaatgtatcagaagacatatctaatcttcactt

SEQ ID NO: 5022 - DNA, 96 bp, Artificial Sequence
  Description of Artificial Sequence: Synthetic primer
aatgatacggcgaccaccgagatctacaccctatcctacactctttccctacacgacgctcttccgatcttcttttggattgttcgtgcagtaatt

SEQ ID NO: 5023 - DNA, 91 bp, Artificial Sequence
  Description of Artificial Sequence: Synthetic primer
aatgatacggcgaccaccgagatctacaccctatcctacactctttccctacacgacgctcttccgatctaaccctaagctcccaagtcca

SEQ ID NO: 5024 - DNA, 96 bp, Artificial Sequence
  Description of Artificial Sequence: Synthetic primer
aatgatacggcgaccaccgagatctacaccctatcctacactctttccctacacgacgctcttccgatctcttgatgctttctgtctatgtgtgtg

SEQ ID NO: 5025 - DNA, 98 bp, Artificial Sequence
  Description of Artificial Sequence: Synthetic primer
aatgatacggcgaccaccgagatctacaccctatcctacactctttccctacacgacgctcttccgatctgagaggaagattggtagtttaaggagat

SEQ ID NO: 5026 - DNA, 97 bp, Artificial Sequence
  Description of Artificial Sequence: Synthetic primer
aatgatacggcgaccaccgagatctacaccctatcctacactctttccctacacgacgctcttccgatcttacctcacagcagtctttctttcccat

SEQ ID NO: 5027 - DNA, 96 bp, Artificial Sequence
  Description of Artificial Sequence: Synthetic primer
aatgatacggcgaccaccgagatctacaccctatcctacactctttccctacacgacgctcttccgatctcctcagacctgttgagtgtaactacc

SEQ ID NO: 5028 - DNA, 93 bp, Artificial Sequence
  Description of Artificial Sequence: Synthetic primer
aatgatacggcgaccaccgagatctacaccctatcctacactctttccctacacgacgctcttccgatcttgtgaggttttgctcttctccag

SEQ ID NO: 5029 - DNA, 94 bp, Artificial Sequence
  Description of Artificial Sequence: Synthetic primer
aatgatacggcgaccaccgagatctacaccctatcctacactctttccctacacgacgctcttccgatcttccattttccaccttctctgcctt

SEQ ID NO: 5030 - DNA, 99 bp, Artificial Sequence
  Description of Artificial Sequence: Synthetic primer
aatgatacggcgaccaccgagatctacaccctatcctacactctttccctacacgacgctcttccgatctgaaactgattgttttccattgtcacctgt

SEQ ID NO: 5031 - DNA, 101 bp, Artificial Sequence
  Description of Artificial Sequence: Synthetic polynucleotide
aatgatacggcgaccaccgagatctacaccctatcctacactctttccctacacgacgctcttccgatctgatatttcctaaaccagaagcatctagtaga

SEQ ID NO: 5032 - DNA, 101 bp, Artificial Sequence
  Description of Artificial Sequence: Synthetic polynucleotide
aatgatacggcgaccaccgagatctacaccctatcctacactctttccctacacgacgctcttccgatctctactttttctccactctccaaaatgatagt

SEQ ID NO: 5033 - DNA, 104 bp, Artificial Sequence
  Description of Artificial Sequence: Synthetic polynucleotide
aatgatacggcgaccaccgagatctacaccctatcctacactctttccctacacgacgctcttccgatctgagattgtatgttagcagttactgtatgttagtg

SEQ ID NO: 5034 - DNA, 93 bp, Artificial Sequence
  Description of Artificial Sequence: Synthetic primer
aatgatacggcgaccaccgagatctacaccctatcctacactctttccctacacgacgctcttccgatctcaccatgcttttgctcccttttg

SEQ ID NO: 5035 - DNA, 95 bp, Artificial Sequence
  Description of Artificial Sequence: Synthetic primer
aatgatacggcgaccaccgagatctacaccctatcctacactctttccctacacgacgctcttccgatctgacctgactcagctcctctgacttt

SEQ ID NO: 5036 - DNA, 94 bp, Artificial Sequence
  Description of Artificial Sequence: Synthetic primer
aatgatacggcgaccaccgagatctacaccctatcctacactctttccctacacgacgctcttccgatctctggttgacctcttgtccatttca

SEQ ID NO: 5037 - DNA, 93 bp, Artificial Sequence
  Description of Artificial Sequence: Synthetic primer
aatgatacggcgaccaccgagatctacaccctatcctacactctttccctacacgacgctcttccgatctcctgggactcaaatgtgtgcagt

SEQ ID NO: 5038 - DNA, 101 bp, Artificial Sequence
  Description of Artificial Sequence: Synthetic polynucleotide
aatgatacggcgaccaccgagatctacaccctatcctacactctttccctacacgacgctcttccgatcttagctctaacactctctgttgttttgtccta

SEQ ID NO: 5039 - DNA, 99 bp, Artificial Sequence
  Description of Artificial Sequence: Synthetic primer
aatgatacggcgaccaccgagatctacaccctatcctacactctttccctacacgacgctcttccgatctatgttgtgatgaatgttttcttttttccc

SEQ ID NO: 5040 - DNA, 94 bp, Artificial Sequence
  Description of Artificial Sequence: Synthetic primer
aatgatacggcgaccaccgagatctacaccctatcctacactctttccctacacgacgctcttccgatcttctcgtactggctcattgaatcgt

SEQ ID NO: 5041 - DNA, 93 bp, Artificial Sequence
  Description of Artificial Sequence: Synthetic primer
aatgatacggcgaccaccgagatctacaccctatcctacactctttccctacacgacgctcttccgatctctaaccctttctgccaccctctt

SEQ ID NO: 5042 - DNA, 103 bp, Artificial Sequence
  Description of Artificial Sequence: Synthetic polynucleotide
aatgatacggcgaccaccgagatctacaccctatcctacactctttccctacacgacgctcttccgatctatctgcattcattttctcataacttctttctct

SEQ ID NO: 5043 - DNA, 97 bp, Artificial Sequence
  Description of Artificial Sequence: Synthetic primer
aatgatacggcgaccaccgagatctacaccctatcctacactctttccctacacgacgctcttccgatctctagaatgtcttctgccatagagaaca

SEQ ID NO: 5044 - DNA, 95 bp, Artificial Sequence
  Description of Artificial Sequence: Synthetic primer
aatgatacggcgaccaccgagatctacaccctatcctacactctttccctacacgacgctcttccgatctatgaggaaatgttcaaaggctccat

SEQ ID NO: 5045 - DNA, 95 bp, Artificial Sequence
  Description of Artificial Sequence: Synthetic primer
aatgatacggcgaccaccgagatctacaccctatcctacactctttccctacacgacgctcttccgatctttttctctctgcctttctatccagg

SEQ ID NO: 5046 - DNA, 94 bp, Artificial Sequence
  Description of Artificial Sequence: Synthetic primer
aatgatacggcgaccaccgagatctacaccctatcctacactctttccctacacgacgctcttccgatctcccagcccttatgtgacttgtttc

SEQ ID NO: 5047 - DNA, 103 bp, Artificial Sequence
  Description of Artificial Sequence: Synthetic polynucleotide
aatgatacggcgaccaccgagatctacaccctatcctacactctttccctacacgacgctcttccgatctttttgaggtgggacattaaagaatgtcattatg

SEQ ID NO: 5048 - DNA, 95 bp, Artificial Sequence
  Description of Artificial Sequence: Synthetic primer
aatgatacggcgaccaccgagatctacaccctatcctacactctttccctacacgacgctcttccgatctctgacctggagctatctactttgtc

SEQ ID NO: 5049 - DNA, 95 bp, Artificial Sequence
  Description of Artificial Sequence: Synthetic primer
aatgatacggcgaccaccgagatctacaccctatcctacactctttccctacacgacgctcttccgatctccctcttttcctaagctccacacct

SEQ ID NO: 5050 - DNA, 91 bp, Artificial Sequence
  Description of Artificial Sequence: Synthetic primer
aatgatacggcgaccaccgagatctacaccctatcctacactctttccctacacgacgctcttccgatcttgcccagtttgaatgccagtc

SEQ ID NO: 5051 - DNA, 99 bp, Artificial Sequence
  Description of Artificial Sequence: Synthetic primer
aatgatacggcgaccaccgagatctacaccctatcctacactctttccctacacgacgctcttccgatctattctttctgggtttgtactctgtctcta

SEQ ID NO: 5052 - DNA, 98 bp, Artificial Sequence
  Description of Artificial Sequence: Synthetic primer
aatgatacggcgaccaccgagatctacaccctatcctacactctttccctacacgacgctcttccgatctcaatgagagttctcggtttgcttttttc

SEQ ID NO: 5053 - DNA, 98 bp, Artificial Sequence
  Description of Artificial Sequence: Synthetic primer
aatgatacggcgaccaccgagatctacaccctatcctacactctttccctacacgacgctcttccgatcttcatcaccttttgccttcctctcttttg

SEQ ID NO: 5054 - DNA, 98 bp, Artificial Sequence
  Description of Artificial Sequence: Synthetic primer
aatgatacggcgaccaccgagatctacaccctatcctacactctttccctacacgacgctcttccgatcttcccaccaccacagttagagaattatta

SEQ ID NO: 5055 - DNA, 96 bp, Artificial Sequence
  Description of Artificial Sequence: Synthetic primer
aatgatacggcgaccaccgagatctacaccctatcctacactctttccctacacgacgctcttccgatctacttctctctaaagaacctcagggca

SEQ ID NO: 5056 - DNA, 96 bp, Artificial Sequence
  Description of Artificial Sequence: Synthetic primer
aatgatacggcgaccaccgagatctacaccctatcctacactctttccctacacgacgctcttccgatctgtgaagcagggaacaatcactaatac

SEQ ID NO: 5057 - DNA, 101 bp, Artificial Sequence
  Description of Artificial Sequence: Synthetic polynucleotide
aatgatacggcgaccaccgagatctacaccctatcctacactctttccctacacgacgctcttccgatctggcacacttgatgaattatgtagttcattgt

SEQ ID NO: 5058 - DNA, 99 bp, Artificial Sequence
  Description of Artificial Sequence: Synthetic primer
aatgatacggcgaccaccgagatctacaccctatcctacactctttccctacacgacgctcttccgatctgtctattctcacaaaaactgtttgttgct

SEQ ID NO: 5059 - DNA, 102 bp, Artificial Sequence
  Description of Artificial Sequence: Synthetic polynucleotide
aatgatacggcgaccaccgagatctacaccctatcctacactctttccctacacgacgctcttccgatctcataatgcacatttcatctttttcattctagc

SEQ ID NO: 5060 - DNA, 99 bp, Artificial Sequence
  Description of Artificial Sequence: Synthetic primer
aatgatacggcgaccaccgagatctacaccctatcctacactctttccctacacgacgctcttccgatctgttgtatgaaataaaccttagctgctgat

SEQ ID NO: 5061 - DNA, 101 bp, Artificial Sequence
  Description of Artificial Sequence: Synthetic polynucleotide
aatgatacggcgaccaccgagatctacaccctatcctacactctttccctacacgacgctcttccgatctggtacgttatctcattgtgtgtactttctcc

SEQ ID NO: 5062 - DNA, 101 bp, Artificial Sequence
  Description of Artificial Sequence: Synthetic polynucleotide
aatgatacggcgaccaccgagatctacaccctatcctacactctttccctacacgacgctcttccgatctatgtttgtgatttactctgttatgatctagg

SEQ ID NO: 5063 - DNA, 98 bp, Artificial Sequence
  Description of Artificial Sequence: Synthetic primer
aatgatacggcgaccaccgagatctacaccctatcctacactctttccctacacgacgctcttccgatctaaaactatttctgcatccagtgatttgt

SEQ ID NO: 5064 - DNA, 100 bp, Artificial Sequence
  Description of Artificial Sequence: Synthetic polynucleotide
aatgatacggcgaccaccgagatctacaccctatcctacactctttccctacacgacgctcttccgatcttgcaatgagtatgcacattttaacattatg

SEQ ID NO: 5065 - DNA, 97 bp, Artificial Sequence
  Description of Artificial Sequence: Synthetic primer
aatgatacggcgaccaccgagatctacaccctatcctacactctttccctacacgacgctcttccgatctaaattggcaaattgttgtttcctagcg

SEQ ID NO: 5066 - DNA, 100 bp, Artificial Sequence
  Description of Artificial Sequence: Synthetic polynucleotide
aatgatacggcgaccaccgagatctacaccctatcctacactctttccctacacgacgctcttccgatctagccaagttaaactcagtttactacgttgt

SEQ ID NO: 5067 - DNA, 94 bp, Artificial Sequence
  Description of Artificial Sequence: Synthetic primer
aatgatacggcgaccaccgagatctacaccctatcctacactctttccctacacgacgctcttccgatctactgtgactcggtgttcatttctc

SEQ ID NO: 5068 - DNA, 91 bp, Artificial Sequence
  Description of Artificial Sequence: Synthetic primer
aatgatacggcgaccaccgagatctacaccctatcctacactctttccctacacgacgctcttccgatctacaacctggaagctcagtggt

SEQ ID NO: 5069 - DNA, 104 bp, Artificial Sequence
  Description of Artificial Sequence: Synthetic polynucleotide
aatgatacggcgaccaccgagatctacaccctatcctacactctttccctacacgacgctcttccgatctgaaggatgcaataaaatctttagtgaatggagaa

SEQ ID NO: 5070 - DNA, 103 bp, Artificial Sequence
  Description of Artificial Sequence: Synthetic polynucleotide
aatgatacggcgaccaccgagatctacaccctatcctacactctttccctacacgacgctcttccgatctgaagcaaaatagattcattttttaagccgaagt

SEQ ID NO: 5071 - DNA, 105 bp, Artificial Sequence
  Description of Artificial Sequence: Synthetic polynucleotide
aatgatacggcgaccaccgagatctacaccctatcctacactctttccctacacgacgctcttccgatctgatattcatgcagatacctacttttacatacacac

SEQ ID NO: 5072 - DNA, 98 bp, Artificial Sequence
  Description of Artificial Sequence: Synthetic primer
aatgatacggcgaccaccgagatctacaccctatcctacactctttccctacacgacgctcttccgatctgaaaacagcttttgtcccgtatggaaat

SEQ ID NO: 5073 - DNA, 90 bp, Artificial Sequence
  Description of Artificial Sequence: Synthetic primer
aatgatacggcgaccaccgagatctacaccctatcctacactctttccctacacgacgctcttccgatctatgggtgatcggcctgtcca

SEQ ID NO: 5074 - DNA, 103 bp, Artificial Sequence
  Description of Artificial Sequence: Synthetic polynucleotide
aatgatacggcgaccaccgagatctacaccctatcctacactctttccctacacgacgctcttccgatctccagattgaaagtccctttgaataaataaaatg

SEQ ID NO: 5075 - DNA, 100 bp, Artificial Sequence
  Description of Artificial Sequence: Synthetic polynucleotide
aatgatacggcgaccaccgagatctacaccctatcctacactctttccctacacgacgctcttccgatcttcagatgaactctaaggctaaaaaaaatga

SEQ ID NO: 5076 - DNA, 92 bp, Artificial Sequence
  Description of Artificial Sequence: Synthetic primer
aatgatacggcgaccaccgagatctacaccctatcctacactctttccctacacgacgctcttccgatctcctggtcccagaggagcttgac

SEQ ID NO: 5077 - DNA, 89 bp, Artificial Sequence
  Description of Artificial Sequence: Synthetic primer
aatgatacggcgaccaccgagatctacaccctatcctacactctttccctacacgacgctcttccgatctaaaggagccgcgccacaag

SEQ ID NO: 5078 - DNA, 103 bp, Artificial Sequence
  Description of Artificial Sequence: Synthetic polynucleotide
aatgatacggcgaccaccgagatctacaccctatcctacactctttccctacacgacgctcttccgatctttcaaaattcattttactaagcacaacactctg

SEQ ID NO: 5079 - DNA, 102 bp, Artificial Sequence
  Description of Artificial Sequence: Synthetic polynucleotide
aatgatacggcgaccaccgagatctacaccctatcctacactctttccctacacgacgctcttccgatcttctcaaaccattctactatcacaatctactta

SEQ ID NO: 5080 - DNA, 98 bp, Artificial Sequence
  Description of Artificial Sequence: Synthetic primer
aatgatacggcgaccaccgagatctacaccctatcctacactctttccctacacgacgctcttccgatctttgttaccaaagagaatgtcttcaaact

SEQ ID NO: 5081 - DNA, 95 bp, Artificial Sequence
  Description of Artificial Sequence: Synthetic primer
aatgatacggcgaccaccgagatctacaccctatcctacactctttccctacacgacgctcttccgatctggcctggaatctcctctatcactag

SEQ ID NO: 5082 - DNA, 99 bp, Artificial Sequence
  Description of Artificial Sequence: Synthetic primer
aatgatacggcgaccaccgagatctacaccctatcctacactctttccctacacgacgctcttccgatctaaaagtcagctttttttctttctgtgatc

SEQ ID NO: 5083 - DNA, 103 bp, Artificial Sequence
  Description of Artificial Sequence: Synthetic polynucleotide
aatgatacggcgaccaccgagatctacaccctatcctacactctttccctacacgacgctcttccgatctggttttgagataaatatgacagaaatatccttc

SEQ ID NO: 5084 - DNA, 100 bp, Artificial Sequence
  Description of Artificial Sequence: Synthetic polynucleotide
aatgatacggcgaccaccgagatctacaccctatcctacactctttccctacacgacgctcttccgatctagcttcttcagtatatgtcaatgaaaacat

SEQ ID NO: 5085 - DNA, 102 bp, Artificial Sequence
  Description of Artificial Sequence: Synthetic polynucleotide
aatgatacggcgaccaccgagatctacaccctatcctacactctttccctacacgacgctcttccgatctctgcaggttacataaaactaacgaaagtataa

SEQ ID NO: 5086 - DNA, 99 bp, Artificial Sequence
  Description of Artificial Sequence: Synthetic primer
aatgatacggcgaccaccgagatctacaccctatcctacactctttccctacacgacgctcttccgatctgggaatcgacgaagtaaatcttcttgtaa

SEQ ID NO: 5087 - DNA, 95 bp, Artificial Sequence
  Description of Artificial Sequence: Synthetic primer
aatgatacggcgaccaccgagatctacaccctatcctacactctttccctacacgacgctcttccgatcttgaggacagcacattgccaagtata

SEQ ID NO: 5088 - DNA, 102 bp, Artificial Sequence
  Description of Artificial Sequence: Synthetic polynucleotide
aatgatacggcgaccaccgagatctacaccctatcctacactctttccctacacgacgctcttccgatctcaaactttcttaaagtggcctttgctttttaa

SEQ ID NO: 5089 - DNA, 102 bp, Artificial Sequence
  Description of Artificial Sequence: Synthetic polynucleotide
aatgatacggcgaccaccgagatctacaccctatcctacactctttccctacacgacgctcttccgatctagtgtatagacaaaagaattattccaacctcc

SEQ ID NO: 5090 - DNA, 99 bp, Artificial Sequence
  Description of Artificial Sequence: Synthetic primer
aatgatacggcgaccaccgagatctacaccctatcctacactctttccctacacgacgctcttccgatctccaagccttgataatcaagaagaaaagaa

SEQ ID NO: 5091 - DNA, 102 bp, Artificial Sequence
  Description of Artificial Sequence: Synthetic polynucleotide
aatgatacggcgaccaccgagatctacaccctatcctacactctttccctacacgacgctcttccgatctaacattcacatcatgttagagcatttagggaa

SEQ ID NO: 5092 - DNA, 97 bp, Artificial Sequence
  Description of Artificial Sequence: Synthetic primer
aatgatacggcgaccaccgagatctacaccctatcctacactctttccctacacgacgctcttccgatctctgttaccaaaagccaggtgacattca

SEQ ID NO: 5093 - DNA, 93 bp, Artificial Sequence
  Description of Artificial Sequence: Synthetic primer
aatgatacggcgaccaccgagatctacaccctatcctacactctttccctacacgacgctcttccgatctcgtgagcaaagctgacaacagca

SEQ ID NO: 5094 - DNA, 94 bp, Artificial Sequence
  Description of Artificial Sequence: Synthetic primer
aatgatacggcgaccaccgagatctacaccctatcctacactctttccctacacgacgctcttccgatctcacaaagcccaaaaaccaggtttt

SEQ ID NO: 5095 - DNA, 92 bp, Artificial Sequence
  Description of Artificial Sequence: Synthetic primer
aatgatacggcgaccaccgagatctacaccctatcctacactctttccctacacgacgctcttccgatcttggcacaaaacacccaatttgg

SEQ ID NO: 5096 - DNA, 97 bp, Artificial Sequence
  Description of Artificial Sequence: Synthetic primer
aatgatacggcgaccaccgagatctacaccctatcctacactctttccctacacgacgctcttccgatctttctcacaggacagagacatacatttc

SEQ ID NO: 5097 - DNA, 97 bp, Artificial Sequence
  Description of Artificial Sequence: Synthetic primer
aatgatacggcgaccaccgagatctacaccctatcctacactctttccctacacgacgctcttccgatctaaatccatcgtaggtagaagttcctct

SEQ ID NO: 5098 - DNA, 101 bp, Artificial Sequence
  Description of Artificial Sequence: Synthetic polynucleotide
aatgatacggcgaccaccgagatctacaccctatcctacactctttccctacacgacgctcttccgatctagtttcccattaccaagttctgaatttagag

SEQ ID NO: 5099 - DNA, 102 bp, Artificial Sequence
  Description of Artificial Sequence: Synthetic polynucleotide
aatgatacggcgaccaccgagatctacaccctatcctacactctttccctacacgacgctcttccgatcttagtgtcctgtttatgtaataatagagaagct

SEQ ID NO: 5100 - DNA, 100 bp, Artificial Sequence
  Description of Artificial Sequence: Synthetic polynucleotide
aatgatacggcgaccaccgagatctacaccctatcctacactctttccctacacgacgctcttccgatctatattaccttcattccattactgggatttt

SEQ ID NO: 5101 - DNA, 91 bp, Artificial Sequence
  Description of Artificial Sequence: Synthetic primer
aatgatacggcgaccaccgagatctacaccctatcctacactctttccctacacgacgctcttccgatctcttgttggcatcactcagcgc

SEQ ID NO: 5102 - DNA, 88 bp, Artificial Sequence
  Description of Artificial Sequence: Synthetic primer
aatgatacggcgaccaccgagatctacaccctatcctacactctttccctacacgacgctcttccgatctcaagccaactctgcggcc

SEQ ID NO: 5103 - DNA, 96 bp, Artificial Sequence
  Description of Artificial Sequence: Synthetic primer
aatgatacggcgaccaccgagatctacaccctatcctacactctttccctacacgacgctcttccgatctcacaaacacacacacatggcagtagt

SEQ ID NO: 5104 - DNA, 94 bp, Artificial Sequence
  Description of Artificial Sequence: Synthetic primer
aatgatacggcgaccaccgagatctacaccctatcctacactctttccctacacgacgctcttccgatctataacaactgaatgcttgccgtgt

SEQ ID NO: 5105 - DNA, 92 bp, Artificial Sequence
  Description of Artificial Sequence: Synthetic primer
aatgatacggcgaccaccgagatctacaccctatcctacactctttccctacacgacgctcttccgatcttccgctttcgagcaactttgac

SEQ ID NO: 5106 - DNA, 98 bp, Artificial Sequence
  Description of Artificial Sequence: Synthetic primer
aatgatacggcgaccaccgagatctacaccctatcctacactctttccctacacgacgctcttccgatctatctttctacatcgtgcctccatcattt

SEQ ID NO: 5107 - DNA, 95 bp, Artificial Sequence
  Description of Artificial Sequence: Synthetic primer
aatgatacggcgaccaccgagatctacaccctatcctacactctttccctacacgacgctcttccgatctagcagagagggccaattcacttttc

SEQ ID NO: 5108 - DNA, 96 bp, Artificial Sequence
  Description of Artificial Sequence: Synthetic primer
aatgatacggcgaccaccgagatctacaccctatcctacactctttccctacacgacgctcttccgatctcacattactttgaatccttccagagc

SEQ ID NO: 5109 - DNA, 98 bp, Artificial Sequence
  Description of Artificial Sequence: Synthetic primer
aatgatacggcgaccaccgagatctacaccctatcctacactctttccctacacgacgctcttccgatctcactacttatcaaagcctgagaacaagc

SEQ ID NO: 5110 - DNA, 99 bp, Artificial Sequence
  Description of Artificial Sequence: Synthetic primer
aatgatacggcgaccaccgagatctacaccctatcctacactctttccctacacgacgctcttccgatctgatggcgtgatcctttaagctctaagaag

SEQ ID NO: 5111 - DNA, 101 bp, Artificial Sequence
  Description of Artificial Sequence: Synthetic polynucleotide
aatgatacggcgaccaccgagatctacaccctatcctacactctttccctacacgacgctcttccgatctcacctaagtatgttattcctaatgtcacaaa

SEQ ID NO: 5112 - DNA, 102 bp, Artificial Sequence
  Description of Artificial Sequence: Synthetic polynucleotide
aatgatacggcgaccaccgagatctacaccctatcctacactctttccctacacgacgctcttccgatctcttttatcacatctaaatgactgaatgagaac

SEQ ID NO: 5113 - DNA, 101 bp, Artificial Sequence
  Description of Artificial Sequence: Synthetic polynucleotide
aatgatacggcgaccaccgagatctacaccctatcctacactctttccctacacgacgctcttccgatctagtcttcaaatgagaagtttaatgtcttacc

SEQ ID NO: 5114 - DNA, 95 bp, Artificial Sequence
  Description of Artificial Sequence: Synthetic primer
aatgatacggcgaccaccgagatctacaccctatcctacactctttccctacacgacgctcttccgatctccctctcaaaaaaccgaatttgtgg

SEQ ID NO: 5115 - DNA, 102 bp, Artificial Sequence
  Description of Artificial Sequence: Synthetic polynucleotide
aatgatacggcgaccaccgagatctacaccctatcctacactctttccctacacgacgctcttccgatcttcataatgttgtctgaatttaccacctttgtc

SEQ ID NO: 5116 - DNA, 101 bp, Artificial Sequence
  Description of Artificial Sequence: Synthetic polynucleotide
aatgatacggcgaccaccgagatctacaccctatcctacactctttccctacacgacgctcttccgatctcccttttgaataacttcctctgggagattag

SEQ ID NO: 5117 - DNA, 102 bp, Artificial Sequence; identical to SEQ ID NO: 5115
  Description of Artificial Sequence: Synthetic polynucleotide

SEQ ID NO: 5118 - DNA, 89 bp, Artificial Sequence
  Description of Artificial Sequence: Synthetic primer
aatgatacggcgaccaccgagatctacaccctatcctacactctttccctacacgacgctcttccgatctgcatgccgtcccgcgatat

SEQ ID NO: 5119 - DNA, 96 bp, Artificial Sequence
  Description of Artificial Sequence: Synthetic primer
aatgatacggcgaccaccgagatctacaccctatcctacactctttccctacacgacgctcttccgatctcttcctggcataccatcttgcttgtc

SEQ ID NO: 5120 - DNA, 95 bp, Artificial Sequence
  Description of Artificial Sequence: Synthetic primer
aatgatacggcgaccaccgagatctacaccctatcctacactctttccctacacgacgctcttccgatctcatggactgaagatcggttccagag

SEQ ID NO: 5121 - DNA, 100 bp, Artificial Sequence
  Description of Artificial Sequence: Synthetic polynucleotide
aatgatacggcgaccaccgagatctacaccctatcctacactctttccctacacgacgctcttccgatcttctcataaatataatggtgccacctcttct

SEQ ID NO: 5122 - DNA, 95 bp, Artificial Sequence
  Description of Artificial Sequence: Synthetic primer
aatgatacggcgaccaccgagatctacaccctatcctacactctttccctacacgacgctcttccgatctctgcttctgactttctgaatgccaa

SEQ ID NO: 5123 - DNA, 103 bp, Artificial Sequence
  Description of Artificial Sequence: Synthetic polynucleotide
aatgatacggcgaccaccgagatctacaccctatcctacactctttccctacacgacgctcttccgatctaagaagaggagggtatatttttttgtagtcact

SEQ ID NO: 5124 - DNA, 103 bp, Artificial Sequence
  Description of Artificial Sequence: Synthetic polynucleotide
aatgatacggcgaccaccgagatctacaccctatcctacactctttccctacacgacgctcttccgatctaacagagcacagttttgcctctaaaaaataaaa

SEQ ID NO: 5125 - DNA, 98 bp, Artificial Sequence
  Description of Artificial Sequence: Synthetic primer
aatgatacggcgaccaccgagatctacaccctatcctacactctttccctacacgacgctcttccgatctataaggagagaatgcagaagaaaatgtg

SEQ ID NO: 5126 - DNA, 97 bp, Artificial Sequence
  Description of Artificial Sequence: Synthetic primer
aatgatacggcgaccaccgagatctacaccctatcctacactctttccctacacgacgctcttccgatcttagaagaacaaagtgaagtaacagcac

SEQ ID NO: 5127 - DNA, 91 bp, Artificial Sequence
  Description of Artificial Sequence: Synthetic primer
aatgatacggcgaccaccgagatctacaccctatcctacactctttccctacacgacgctcttccgatctggtccaatgggtgttctgggc

SEQ ID NO: 5128 - DNA, 96 bp, Artificial Sequence
  Description of Artificial Sequence: Synthetic primer
aatgatacggcgaccaccgagatctacaccctatcctacactctttccctacacgacgctcttccgatcttgtctttccaaacgcaaagctagact

SEQ ID NO: 5129 - DNA, 94 bp, Artificial Sequence
  Description of Artificial Sequence: Synthetic primer
aatgatacggcgaccaccgagatctacaccctatcctacactctttccctacacgacgctcttccgatctaatgggtgttctgggctttgtagc

SEQ ID NO: 5130 - DNA, 93 bp, Artificial Sequence
  Description of Artificial Sequence: Synthetic primer
aatgatacggcgaccaccgagatctacaccctatcctacactctttccctacacgacgctcttccgatctctgtgtgtgggagcatgggtaga

SEQ ID NO: 5131 - DNA, 100 bp, Artificial Sequence
  Description of Artificial Sequence: Synthetic polynucleotide
aatgatacggcgaccaccgagatctacaccctatcctacactctttccctacacgacgctcttccgatctaaagcactgagaacattactgtatcccttt

SEQ ID NO: 5132 - DNA, 98 bp, Artificial Sequence
  Description of Artificial Sequence: Synthetic primer
aatgatacggcgaccaccgagatctacaccctatcctacactctttccctacacgacgctcttccgatctcagacctgttatgaaggtcctctctgaa

SEQ ID NO: 5133 - DNA, 100 bp, Artificial Sequence; identical to SEQ ID NO: 5131
  Description of Artificial Sequence: Synthetic polynucleotide

SEQ ID NO: 5134 - DNA, 99 bp, Artificial Sequence
  Description of Artificial Sequence: Synthetic primer
aatgatacggcgaccaccgagatctacaccctatcctacactctttccctacacgacgctcttccgatctatccaatgtactagaaattgtacttggtc

SEQ ID NO: 5135 - DNA, 100 bp, Artificial Sequence
  Description of Artificial Sequence: Synthetic polynucleotide
aatgatacggcgaccaccgagatctacaccctatcctacactctttccctacacgacgctcttccgatctcacaagtacaacactgcttattttcttgct

SEQ ID NO: 5136 - DNA, 90 bp, Artificial Sequence
  Description of Artificial Sequence: Synthetic primer
aatgatacggcgaccaccgagatctacaccctatcctacactctttccctacacgacgctcttccgatctagtgggcagaactgggagcc

SEQ ID NO: 5137 - DNA, 100 bp, Artificial Sequence; identical to SEQ ID NO: 5135
  Description of Artificial Sequence: Synthetic polynucleotide

SEQ ID NO: 5138 - DNA, 94 bp, Artificial Sequence
  Description of Artificial Sequence: Synthetic primer
aatgatacggcgaccaccgagatctacaccctatcctacactctttccctacacgacgctcttccgatctggcctccctccttccattttttca

SEQ ID NO: 5139 - DNA, 95 bp, Artificial Sequence
  Description of Artificial Sequence: Synthetic primer
aatgatacggcgaccaccgagatctacaccctatcctacactctttccctacacgacgctcttccgatcttcacctccctgtcttcttgtctagg

SEQ ID NO: 5140 - DNA, 93 bp, Artificial Sequence
  Description of Artificial Sequence: Synthetic primer
aatgatacggcgaccaccgagatctacaccctatcctacactctttccctacacgacgctcttccgatctaggatgttggcttttgaggctat

SEQ ID NO: 5141 - DNA, 92 bp, Artificial Sequence
  Description of Artificial Sequence: Synthetic primer
aatgatacggcgaccaccgagatctacaccctatcctacactctttccctacacgacgctcttccgatctccctcttggcttgagtagggtt

SEQ ID NO: 5142 - DNA, 95 bp, Artificial Sequence
  Description of Artificial Sequence: Synthetic primer
aatgatacggcgaccaccgagatctacaccctatcctacactctttccctacacgacgctcttccgatctaaggatgttggcttttgaggctata

SEQ ID NO: 5143 - DNA, 89 bp, Artificial Sequence
  Description of Artificial Sequence: Synthetic primer
aatgatacggcgaccaccgagatctacaccctatcctacactctttccctacacgacgctcttccgatcttgggaccagaccctgggag

SEQ ID NO: 5144 - DNA, 91 bp, Artificial Sequence
  Description of Artificial Sequence: Synthetic primer
aatgatacggcgaccaccgagatctacaccctatcctacactctttccctacacgacgctcttccgatctccggccaggagatttcaacca

SEQ ID NO: 5145 - DNA, 99 bp, Artificial Sequence
  Description of Artificial Sequence: Synthetic primer
aatgatacggcgaccaccgagatctacaccctatcctacactctttccctacacgacgctcttccgatctataatcttgagtcttgcactccaatcagg

SEQ ID NO: 5146 - DNA, 90 bp, Artificial Sequence
  Description of Artificial Sequence: Synthetic primer
aatgatacggcgaccaccgagatctacaccctatcctacactctttccctacacgacgctcttccgatctcaacactggacagtgccacc

SEQ ID NO: 5147 - DNA, 91 bp, Artificial Sequence; identical to SEQ ID NO: 5144
  Description of Artificial Sequence: Synthetic primer

SEQ ID NO: 5148 - DNA, 99 bp, Artificial Sequence; identical to SEQ ID NO: 5145
  Description of Artificial Sequence: Synthetic primer

SEQ ID NO: 5149 - DNA, 90 bp, Artificial Sequence; identical to SEQ ID NO: 5146
  Description of Artificial Sequence: Synthetic primer

SEQ ID NO: 5150 - DNA, 96 bp, Artificial Sequence
  Description of Artificial Sequence: Synthetic primer
aatgatacggcgaccaccgagatctacaccctatcctacactctttccctacacgacgctcttccgatctcacagcagtgttcccttcttttaggg

SEQ ID NO: 5151 - DNA, 89 bp, Artificial Sequence
  Description of Artificial Sequence: Synthetic primer
aatgatacggcgaccaccgagatctacaccctatcctacactctttccctacacgacgctcttccgatctgggatggcaggagggtagg

SEQ ID NO: 5152 - DNA, 90 bp, Artificial Sequence
  Description of Artificial Sequence: Synthetic primer
aatgatacggcgaccaccgagatctacaccctatcctacactctttccctacacgacgctcttccgatctcagtgtcctcatgccaaccc

SEQ ID NO: 5153 - DNA, 96 bp, Artificial Sequence; identical to SEQ ID NO: 5150
  Description of Artificial Sequence: Synthetic primer

SEQ ID NO: 5154 - DNA, 89 bp, Artificial Sequence; identical to SEQ ID NO: 5151
  Description of Artificial Sequence: Synthetic primer

SEQ ID NO: 5155 - DNA, 90 bp, Artificial Sequence; identical to SEQ ID NO: 5152
  Description of Artificial Sequence: Synthetic primer

SEQ ID NO: 5156 - DNA, 89 bp, Artificial Sequence; identical to SEQ ID NO: 5151
  Description of Artificial Sequence: Synthetic primer

SEQ ID NO: 5157 - DNA, 90 bp, Artificial Sequence; identical to SEQ ID NO: 5152
  Description of Artificial Sequence: Synthetic primer

SEQ ID NO: 5158 - DNA, 89 bp, Artificial Sequence; identical to SEQ ID NO: 5151
  Description of Artificial Sequence: Synthetic primer

SEQ ID NO: 5159 - DNA, 90 bp, Artificial Sequence; identical to SEQ ID NO: 5152
  Description of Artificial Sequence: Synthetic primer

SEQ ID NO: 5160 - DNA, 90 bp, Artificial Sequence
  Description of Artificial Sequence: Synthetic primer
aatgatacggcgaccaccgagatctacaccctatcctacactctttccctacacgacgctcttccgatctatactgccacaggctgctgt

SEQ ID NO: 5161 - DNA, 97 bp, Artificial Sequence
  Description of Artificial Sequence: Synthetic primer
aatgatacggcgaccaccgagatctacaccctatcctacactctttccctacacgacgctcttccgatcttatgctggtcagtacatctcctgagag

SEQ ID NO: 5162 - DNA, 90 bp, Artificial Sequence; identical to SEQ ID NO: 5160
  Description of Artificial Sequence: Synthetic primer

SEQ ID NO: 5163 - DNA, 94 bp, Artificial Sequence
  Description of Artificial Sequence: Synthetic primer
aatgatacggcgaccaccgagatctacaccctatcctacactctttccctacacgacgctcttccgatctttggctgggtctttttgtttcagg

SEQ ID NO: 5164 - DNA, 90 bp, Artificial Sequence
  Description of Artificial Sequence: Synthetic primer
aatgatacggcgaccaccgagatctacaccctatcctacactctttccctacacgacgctcttccgatctgctgaaactgcgccatcgtc

SEQ ID NO: 5165 - DNA, 90 bp, Artificial Sequence
  Description of Artificial Sequence: Synthetic primer
aatgatacggcgaccaccgagatctacaccctatcctacactctttccctacacgacgctcttccgatcttcctcgcctgtggacaacac

SEQ ID NO: 5166 - DNA, 90 bp, Artificial Sequence
  Description of Artificial Sequence: Synthetic primer
aatgatacggcgaccaccgagatctacaccctatcctacactctttccctacacgacgctcttccgatctctgcagcatggcatggtagg

SEQ ID NO: 5167 - DNA, 88 bp, Artificial Sequence
  Description of Artificial Sequence: Synthetic primer
aatgatacggcgaccaccgagatctacaccctatcctacactctttccctacacgacgctcttccgatctcatgctctcgcccgtgga

SEQ ID NO: 5168 - DNA, 94 bp, Artificial Sequence
  Description of Artificial Sequence: Synthetic primer
aatgatacggcgaccaccgagatctacaccctatcctacactctttccctacacgacgctcttccgatctcttcctctggtgatggaaccttgg

SEQ ID NO: 5169 - DNA, 88 bp, Artificial Sequence
  Description of Artificial Sequence: Synthetic primer
aatgatacggcgaccaccgagatctacaccctatcctacactctttccctacacgacgctcttccgatcttcacgcaggcaagtccgc

SEQ ID NO: 5170 - DNA, 89 bp, Artificial Sequence
  Description of Artificial Sequence: Synthetic primer
aatgatacggcgaccaccgagatctacaccctatcctacactctttccctacacgacgctcttccgatctggtgtacgtctgcccagca

SEQ ID NO: 5171 - DNA, 89 bp, Artificial Sequence
  Description of Artificial Sequence: Synthetic primer
aatgatacggcgaccaccgagatctacaccctatcctacactctttccctacacgacgctcttccgatctctcacgctctgatgccgcc

SEQ ID NO: 5172 - DNA, 90 bp, Artificial Sequence
  Description of Artificial Sequence: Synthetic primer
aatgatacggcgaccaccgagatctacaccctatcctacactctttccctacacgacgctcttccgatctgagcacccgtctctgcctct

SEQ ID NO: 5173 - DNA, 89 bp, Artificial Sequence
  Description of Artificial Sequence: Synthetic primer
aatgatacggcgaccaccgagatctacaccctatcctacactctttccctacacgacgctcttccgatctaccggcagtggactcagca

SEQ ID NO: 5174 - DNA, 92 bp, Artificial Sequence
  Description of Artificial Sequence: Synthetic primer
aatgatacggcgaccaccgagatctacaccctatcctacactctttccctacacgacgctcttccgatctgctcagcctcacttctcgaccc

SEQ ID NO: 5175 - DNA, 93 bp, Artificial Sequence
  Description of Artificial Sequence: Synthetic primer
aatgatacggcgaccaccgagatctacaccctatcctacactctttccctacacgacgctcttccgatctacctggagaccaagaagttccgg

SEQ ID NO: 5176 - DNA, 88 bp, Artificial Sequence
  Description of Artificial Sequence: Synthetic primer
aatgatacggcgaccaccgagatctacaccctatcctacactctttccctacacgacgctcttccgatcttgcgtagccgctgcctga

SEQ ID NO: 5177 - DNA, 92 bp, Artificial Sequence; identical to SEQ ID NO: 5174
  Description of Artificial Sequence: Synthetic primer

SEQ ID NO: 5178 - DNA, 88 bp, Artificial Sequence; identical to SEQ ID NO: 5176
  Description of Artificial Sequence: Synthetic primer

SEQ ID NO: 5179 - DNA, 90 bp, Artificial Sequence
  Description of Artificial Sequence: Synthetic primer
aatgatacggcgaccaccgagatctacaccctatcctacactctttccctacacgacgctcttccgatctccctctctgattgtccgccc

SEQ ID NO: 5180 - DNA, 90 bp, Artificial Sequence
  Description of Artificial Sequence: Synthetic primer
aatgatacggcgaccaccgagatctacaccctatcctacactctttccctacacgacgctcttccgatctacacggccagcagatgatct

SEQ ID NO: 5181 - DNA, 91 bp, Artificial Sequence
  Description of Artificial Sequence: Synthetic primer
aatgatacggcgaccaccgagatctacaccctatcctacactctttccctacacgacgctcttccgatctgacagccagtgcaactcagcc

SEQ ID NO: 5182 - DNA, 92 bp, Artificial Sequence
  Description of Artificial Sequence: Synthetic primer
aatgatacggcgaccaccgagatctacaccctatcctacactctttccctacacgacgctcttccgatctcgacaccgtcctgtcttccctc

SEQ ID NO: 5183 - DNA, 89 bp, Artificial Sequence
  Description of Artificial Sequence: Synthetic primer
aatgatacggcgaccaccgagatctacaccctatcctacactctttccctacacgacgctcttccgatctgcagcagggtgagcctctc

SEQ ID NO: 5184 - DNA, 92 bp, Artificial Sequence
  Description of Artificial Sequence: Synthetic primer
aatgatacggcgaccaccgagatctacaccctatcctacactctttccctacacgacgctcttccgatctcttgggccactgacgaaacctg

SEQ ID NO: 5185 - DNA, 91 bp, Artificial Sequence
  Description of Artificial Sequence: Synthetic primer
aatgatacggcgaccaccgagatctacaccctatcctacactctttccctacacgacgctcttccgatcttcgttctgtcgcctgcacagt

SEQ ID NO: 5186 - DNA, 88 bp, Artificial Sequence
  Description of Artificial Sequence: Synthetic primer
aatgatacggcgaccaccgagatctacaccctatcctacactctttccctacacgacgctcttccgatcttctgtgtggacgcgggca

SEQ ID NO: 5187 - DNA, 91 bp, Artificial Sequence
  Description of Artificial Sequence: Synthetic primer
aatgatacggcgaccaccgagatctacaccctatcctacactctttccctacacgacgctcttccgatcttgtgcgttctgagctaccggg

SEQ ID NO: 5188 - DNA, 90 bp, Artificial Sequence
  Description of Artificial Sequence: Synthetic primer
aatgatacggcgaccaccgagatctacaccctatcctacactctttccctacacgacgctcttccgatctgacccaccaatgccctccac

SEQ ID NO: 5189 - DNA, 90 bp, Artificial Sequence
  Description of Artificial Sequence: Synthetic primer
aatgatacggcgaccaccgagatctacaccctatcctacactctttccctacacgacgctcttccgatctcacactcacccttccgtcct

SEQ ID NO: 5190 - DNA, 89 bp, Artificial Sequence
  Description of Artificial Sequence: Synthetic primer
aatgatacggcgaccaccgagatctacaccctatcctacactctttccctacacgacgctcttccgatctaccaaccggcctcctcctg

SEQ ID NO: 5191 - DNA, 90 bp, Artificial Sequence
  Description of Artificial Sequence: Synthetic primer
aatgatacggcgaccaccgagatctacaccctatcctacactctttccctacacgacgctcttccgatctcacgtgtgtctccttcccgc

SEQ ID NO: 5192 - DNA, 88 bp, Artificial Sequence
  Description of Artificial Sequence: Synthetic primer
aatgatacggcgaccaccgagatctacaccctatcctacactctttccctacacgacgctcttccgatctaggtgcctgggagtgctg

SEQ ID NO: 5193 - DNA, 88 bp, Artificial Sequence
  Description of Artificial Sequence: Synthetic primer
aatgatacggcgaccaccgagatctacaccctatcctacactctttccctacacgacgctcttccgatctagggcattgcagacccgg

SEQ ID NO: 5194 - DNA, 90 bp, Artificial Sequence
  Description of Artificial Sequence: Synthetic primer
aatgatacggcgaccaccgagatctacaccctatcctacactctttccctacacgacgctcttccgatctctgacccgccctgcccttag

SEQ ID NO: 5195 - DNA, 92 bp, Artificial Sequence
  Description of Artificial Sequence: Synthetic primer
aatgatacggcgaccaccgagatctacaccctatcctacactctttccctacacgacgctcttccgatctactgcgagaccaacatcaacga

SEQ ID NO: 5196 - DNA, 92 bp, Artificial Sequence
  Description of Artificial Sequence: Synthetic primer
aatgatacggcgaccaccgagatctacaccctatcctacactctttccctacacgacgctcttccgatctccctgaagggccatagtgctgt

SEQ ID NO: 5197 - DNA, 92 bp, Artificial Sequence
  Description of Artificial Sequence: Synthetic primer
aatgatacggcgaccaccgagatctacaccctatcctacactctttccctacacgacgctcttccgatcttttctgtcccaagtccacagct

SEQ ID NO: 5198 - DNA, 90 bp, Artificial Sequence
  Description of Artificial Sequence: Synthetic primer
aatgatacggcgaccaccgagatctacaccctatcctacactctttccctacacgacgctcttccgatctgagcagcctctcacccgtgt

SEQ ID NO: 5199 - DNA, 91 bp, Artificial Sequence
  Description of Artificial Sequence: Synthetic primer
aatgatacggcgaccaccgagatctacaccctatcctacactctttccctacacgacgctcttccgatctccggaacgtcccaagtgtcac

SEQ ID NO: 5200 - DNA, 89 bp, Artificial Sequence
  Description of Artificial Sequence: Synthetic primer
aatgatacggcgaccaccgagatctacaccctatcctacactctttccctacacgacgctcttccgatctagctcagggagtggcagct

SEQ ID NO: 5201 - DNA, 91 bp, Artificial Sequence
  Description of Artificial Sequence: Synthetic primer
aatgatacggcgaccaccgagatctacaccctatcctacactctttccctacacgacgctcttccgatctggactggacctcagggaagag

SEQ ID NO: 5202 - DNA, 89 bp, Artificial Sequence
  Description of Artificial Sequence: Synthetic primer
aatgatacggcgaccaccgagatctacaccctatcctacactctttccctacacgacgctcttccgatctacccacgagtgtgcctgcc

SEQ ID NO: 5203 - DNA, 89 bp, Artificial Sequence
  Description of Artificial Sequence: Synthetic primer
aatgatacggcgaccaccgagatctacaccctatcctacactctttccctacacgacgctcttccgatctagcagtgaggccagcacga

SEQ ID NO: 5204 - DNA, 92 bp, Artificial Sequence
  Description of Artificial Sequence: Synthetic primer
aatgatacggcgaccaccgagatctacaccctatcctacactctttccctacacgacgctcttccgatctactaactgccctggcacatctg

SEQ ID NO: 5205 - DNA, 89 bp, Artificial Sequence
  Description of Artificial Sequence: Synthetic primer
aatgatacggcgaccaccgagatctacaccctatcctacactctttccctacacgacgctcttccgatctgtggtggtggtgcgggtga

SEQ ID NO: 5206 - DNA, 89 bp, Artificial Sequence
  Description of Artificial Sequence: Synthetic primer
aatgatacggcgaccaccgagatctacaccctatcctacactctttccctacacgacgctcttccgatctgaagagagggcgggaccgt

SEQ ID NO: 5207 - DNA, 98 bp, Artificial Sequence
  Description of Artificial Sequence: Synthetic primer
aatgatacggcgaccaccgagatctacaccctatcctacactctttccctacacgacgctcttccgatctaataaattaaaaggcaagtggacttcgg

SEQ ID NO: 5208 - DNA, 90 bp, Artificial Sequence
  Description of Artificial Sequence: Synthetic primer
aatgatacggcgaccaccgagatctacaccctatcctacactctttccctacacgacgctcttccgatctgcaacgtaggagggcgagca

SEQ ID NO: 5209 - DNA, 93 bp, Artificial Sequence
  Description of Artificial Sequence: Synthetic primer
aatgatacggcgaccaccgagatctacaccctatcctacactctttccctacacgacgctcttccgatctgtatccagccgcccacttttgac

SEQ ID NO: 5210 - DNA, 93 bp, Artificial Sequence
  Description of Artificial Sequence: Synthetic primer
aatgatacggcgaccaccgagatctacaccctatcctacactctttccctacacgacgctcttccgatctcgtagttgtgctgatgtgtggag

SEQ ID NO: 5211 - DNA, 99 bp, Artificial Sequence
  Description of Artificial Sequence: Synthetic primer
aatgatacggcgaccaccgagatctacaccctatcctacactctttccctacacgacgctcttccgatcttgttagaaggaatcgttttccttactttt

SEQ ID NO: 5212 - DNA, 97 bp, Artificial Sequence
  Description of Artificial Sequence: Synthetic primer
aatgatacggcgaccaccgagatctacaccctatcctacactctttccctacacgacgctcttccgatcttataatttggattgtgtccgttgagct

SEQ ID NO: 5213 - DNA, 101 bp, Artificial Sequence
  Description of Artificial Sequence: Synthetic polynucleotide
aatgatacggcgaccaccgagatctacaccctatcctacactctttccctacacgacgctcttccgatctgtacccagcctaatcttgtttttcttatgtt

SEQ ID NO: 5214 - DNA, 99 bp, Artificial Sequence
  Description of Artificial Sequence: Synthetic primer
aatgatacggcgaccaccgagatctacaccctatcctacactctttccctacacgacgctcttccgatcttttaataaaaattgaacttccctccctcc

SEQ ID NO: 5215 - DNA, 95 bp, Artificial Sequence
  Description of Artificial Sequence: Synthetic primer
aatgatacggcgaccaccgagatctacaccctatcctacactctttccctacacgacgctcttccgatctaaccctgattactggtttccaacag

SEQ ID NO: 5216 - DNA, 93 bp, Artificial Sequence
  Description of Artificial Sequence: Synthetic primer
aatgatacggcgaccaccgagatctacaccctatcctacactctttccctacacgacgctcttccgatctgtatggctgttggctccttaaca

SEQ ID NO: 5217 - DNA, 95 bp, Artificial Sequence
  Description of Artificial Sequence: Synthetic primer
aatgatacggcgaccaccgagatctacaccctatcctacactctttccctacacgacgctcttccgatctgctttgccacatctgtactcacagt

SEQ ID NO: 5218 - DNA, 95 bp, Artificial Sequence
  Description of Artificial Sequence: Synthetic primer
aatgatacggcgaccaccgagatctacaccctatcctacactctttccctacacgacgctcttccgatctgcctcttctgagactgtcctctttt

SEQ ID NO: 5219 - DNA, 92 bp, Artificial Sequence
  Description of Artificial Sequence: Synthetic primer
aatgatacggcgaccaccgagatctacaccctatcctacactctttccctacacgacgctcttccgatcttcagctctcccttttccgacct

SEQ ID NO: 5220 - DNA, 96 bp, Artificial Sequence
  Description of Artificial Sequence: Synthetic primer
aatgatacggcgaccaccgagatctacaccctatcctacactctttccctacacgacgctcttccgatctccttccctttgtttactactccaacc

SEQ ID NO: 5221 - DNA, 95 bp, Artificial Sequence
  Description of Artificial Sequence: Synthetic primer
aatgatacggcgaccaccgagatctacaccctatcctacactctttccctacacgacgctcttccgatctgggtctcttttgtgctaatcccaag

SEQ ID NO: 5222 - DNA, 96 bp, Artificial Sequence
  Description of Artificial Sequence: Synthetic primer
aatgatacggcgaccaccgagatctacaccctatcctacactctttccctacacgacgctcttccgatctgtgagtctgtctcattcaccatgata

SEQ ID NO: 5223 - DNA, 95 bp, Artificial Sequence
  Description of Artificial Sequence: Synthetic primer
aatgatacggcgaccaccgagatctacaccctatcctacactctttccctacacgacgctcttccgatcttccctcagtcttgcattccttctgt

SEQ ID NO: 5224 - DNA, 89 bp, Artificial Sequence
  Description of Artificial Sequence: Synthetic primer
aatgatacggcgaccaccgagatctacaccctatcctacactctttccctacacgacgctcttccgatcttgcacagtgcccagctttc

SEQ ID NO: 5225 - DNA, 97 bp, Artificial Sequence
  Description of Artificial Sequence: Synthetic primer
aatgatacggcgaccaccgagatctacaccctatcctacactctttccctacacgacgctcttccgatcttgttgatttgggtctcttagcaatgtg

SEQ ID NO: 5226 - DNA, 93 bp, Artificial Sequence
  Description of Artificial Sequence: Synthetic primer
aatgatacggcgaccaccgagatctacaccctatcctacactctttccctacacgacgctcttccgatcttgtgtatctgacaccctccttcc

SEQ ID NO: 5227 - DNA, 93 bp, Artificial Sequence
  Description of Artificial Sequence: Synthetic primer
aatgatacggcgaccaccgagatctacaccctatcctacactctttccctacacgacgctcttccgatcttgggacaggactggaacactctg

SEQ ID NO: 5228 - DNA, 101 bp, Artificial Sequence
  Description of Artificial Sequence: Synthetic polynucleotide
aatgatacggcgaccaccgagatctacaccctatcctacactctttccctacacgacgctcttccgatcttcatgtttacatttttctgttctcctccaag

SEQ ID NO: 5229 - DNA, 91 bp, Artificial Sequence
  Description of Artificial Sequence: Synthetic primer
aatgatacggcgaccaccgagatctacaccctatcctacactctttccctacacgacgctcttccgatctgcagatcccttctccgtgaga

SEQ ID NO: 5230 - DNA, 89 bp, Artificial Sequence
  Description of Artificial Sequence: Synthetic primer
aatgatacggcgaccaccgagatctacaccctatcctacactctttccctacacgacgctcttccgatctcacagaatggcaggcgctt

SEQ ID NO: 5231 - DNA, 100 bp, Artificial Sequence
  Description of Artificial Sequence: Synthetic polynucleotide
aatgatacggcgaccaccgagatctacaccctatcctacactctttccctacacgacgctcttccgatctgggtttggaagtacacactaaatataactg

SEQ ID NO: 5232 - DNA, 89 bp, Artificial Sequence; identical to SEQ ID NO: 5230
  Description of Artificial Sequence: Synthetic primer

SEQ ID NO: 5233 - DNA, 100 bp, Artificial Sequence; identical to SEQ ID NO: 5231
  Description of Artificial Sequence: Synthetic polynucleotide

SEQ ID NO: 5234 - DNA, 98 bp, Artificial Sequence
  Description of Artificial Sequence: Synthetic primer
aatgatacggcgaccaccgagatctacaccctatcctacactctttccctacacgacgctcttccgatctccttgctgaatgattctctcctttcatc

SEQ ID NO: 5235 - DNA, 91 bp, Artificial Sequence
  Description of Artificial Sequence: Synthetic primer
aatgatacggcgaccaccgagatctacaccctatcctacactctttccctacacgacgctcttccgatctcctcaagggagagctggcttc

SEQ ID NO: 5236 - DNA, 91 bp, Artificial Sequence
  Description of Artificial Sequence: Synthetic primer
aatgatacggcgaccaccgagatctacaccctatcctacactctttccctacacgacgctcttccgatcttgtagtcccgcatttgccctc

SEQ ID NO: 5237 - DNA, 98 bp, Artificial Sequence
  Description of Artificial Sequence: Synthetic primer
aatgatacggcgaccaccgagatctacaccctatcctacactctttccctacacgacgctcttccgatctagttggattcttcctttgaaaagagcta

SEQ ID NO: 5238 - DNA, 94 bp, Artificial Sequence
  Description of Artificial Sequence: Synthetic primer
aatgatacggcgaccaccgagatctacaccctatcctacactctttccctacacgacgctcttccgatctatggctctggctgtctctcatatc

SEQ ID NO: 5239 - DNA, 91 bp, Artificial Sequence
  Description of Artificial Sequence: Synthetic primer
aatgatacggcgaccaccgagatctacaccctatcctacactctttccctacacgacgctcttccgatctcaagggcttcagcctccttgc

SEQ ID NO: 5240 - DNA, 97 bp, Artificial Sequence
  Description of Artificial Sequence: Synthetic primer
aatgatacggcgaccaccgagatctacaccctatcctacactctttccctacacgacgctcttccgatctatcatgttcactatccttgcttgtcgc

SEQ ID NO: 5241 - DNA, 97 bp, Artificial Sequence
  Description of Artificial Sequence: Synthetic primer
aatgatacggcgaccaccgagatctacaccctatcctacactctttccctacacgacgctcttccgatctgagcattgctgtctgtttgattctcca

SEQ ID NO: 5242 - DNA, 98 bp, Artificial Sequence
  Description of Artificial Sequence: Synthetic primer
aatgatacggcgaccaccgagatctacaccctatcctacactctttccctacacgacgctcttccgatctttacttccctctgtttctcttccttcta

SEQ ID NO: 5243 - DNA, 91 bp, Artificial Sequence
  Description of Artificial Sequence: Synthetic primer
aatgatacggcgaccaccgagatctacaccctatcctacactctttccctacacgacgctcttccgatctgtttctaggtcgtggcgtcgg

SEQ ID NO: 5244 - DNA, 97 bp, Artificial Sequence
  Description of Artificial Sequence: Synthetic primer
aatgatacggcgaccaccgagatctacaccctatcctacactctttccctacacgacgctcttccgatctaaaaacaagacacccaaacaaggaact

SEQ ID NO: 5245 - DNA, 93 bp, Artificial Sequence
  Description of Artificial Sequence: Synthetic primer
aatgatacggcgaccaccgagatctacaccctatcctacactctttccctacacgacgctcttccgatctactgccagctcacttcactctcc

SEQ ID NO: 5246 - DNA, 100 bp, Artificial Sequence
  Description of Artificial Sequence: Synthetic polynucleotide
aatgatacggcgaccaccgagatctacaccctatcctacactctttccctacacgacgctcttccgatctagtacatttaacaggagagacaggaagaga

SEQ ID NO: 5247 - DNA, 97 bp, Artificial Sequence
  Description of Artificial Sequence: Synthetic primer
aatgatacggcgaccaccgagatctacaccctatcctacactctttccctacacgacgctcttccgatctaaggtataatggcagaatcatcatcct

SEQ ID NO: 5248 - DNA, 98 bp, Artificial Sequence
  Description of Artificial Sequence: Synthetic primer
aatgatacggcgaccaccgagatctacaccctatcctacactctttccctacacgacgctcttccgatctaaagaaggaaggagatgatacaagtacc

SEQ ID NO: 5249 - DNA, 90 bp, Artificial Sequence
  Description of Artificial Sequence: Synthetic primer
aatgatacggcgaccaccgagatctacaccctatcctacactctttccctacacgacgctcttccgatcttgctctgctccaagccattg

SEQ ID NO: 5250 - DNA, 94 bp, Artificial Sequence
  Description of Artificial Sequence: Synthetic primer
aatgatacggcgaccaccgagatctacaccctatcctacactctttccctacacgacgctcttccgatctcatttctttgacctccctggtagc

SEQ ID NO: 5251 - DNA, 98 bp, Artificial Sequence
  Description of Artificial Sequence: Synthetic primer
aatgatacggcgaccaccgagatctacaccctatcctacactctttccctacacgacgctcttccgatctcctctgatgcacactaaaaaaaggcata

SEQ ID NO: 5252 - DNA, 94 bp, Artificial Sequence
  Description of Artificial Sequence: Synthetic primer
aatgatacggcgaccaccgagatctacaccctatcctacactctttccctacacgacgctcttccgatcttggaagacactcatctacagagct

SEQ ID NO: 5253 - DNA, 100 bp, Artificial Sequence
  Description of Artificial Sequence: Synthetic polynucleotide
aatgatacggcgaccaccgagatctacaccctatcctacactctttccctacacgacgctcttccgatctatattctgaccacgaaagaagaagacacat

SEQ ID NO: 5254 - DNA, 94 bp, Artificial Sequence
  Description of Artificial Sequence: Synthetic primer
aatgatacggcgaccaccgagatctacaccctatcctacactctttccctacacgacgctcttccgatctttgtcctgactgttgaggaactca

SEQ ID NO: 5255 - DNA, 99 bp, Artificial Sequence
  Description of Artificial Sequence: Synthetic primer
aatgatacggcgaccaccgagatctacaccctatcctacactctttccctacacgacgctcttccgatcttatgcttgttctcattggcttcaaagatc

SEQ ID NO: 5256 - DNA, 97 bp, Artificial Sequence
  Description of Artificial Sequence: Synthetic primer
aatgatacggcgaccaccgagatctacaccctatcctacactctttccctacacgacgctcttccgatctaaattgtaaagttgtgtgcaagggaaa

SEQ ID NO: 5257 - DNA, 104 bp, Artificial Sequence
  Description of Artificial Sequence: Synthetic polynucleotide
aatgatacggcgaccaccgagatctacaccctatcctacactctttccctacacgacgctcttccgatcttagctgcatgattttgagaaattcccttaatatc

SEQ ID NO: 5258 - DNA, 91 bp, Artificial Sequence
  Description of Artificial Sequence: Synthetic primer
aatgatacggcgaccaccgagatctacaccctatcctacactctttccctacacgacgctcttccgatcttcactccaggtcagtgagccc

SEQ ID NO: 5259 - DNA, 102 bp, Artificial Sequence
  Description of Artificial Sequence: Synthetic polynucleotide
aatgatacggcgaccaccgagatctacaccctatcctacactctttccctacacgacgctcttccgatctaagataatgatagacagcaacatctctctttg

SEQ ID NO: 5260 - DNA, 98 bp, Artificial Sequence
  Description of Artificial Sequence: Synthetic primer
aatgatacggcgaccaccgagatctacaccctatcctacactctttccctacacgacgctcttccgatctgtatcatattaaaccactggaaagtccc

SEQ ID NO: 5261 - DNA, 98 bp, Artificial Sequence
  Description of Artificial Sequence: Synthetic primer
aatgatacggcgaccaccgagatctacaccctatcctacactctttccctacacgacgctcttccgatctatctgggtctaaaaaggtctgtgttcct

SEQ ID NO: 5262 - DNA, 96 bp, Artificial Sequence
  Description of Artificial Sequence: Synthetic primer
aatgatacggcgaccaccgagatctacaccctatcctacactctttccctacacgacgctcttccgatctagagattaaagtgaaggaggatgagc

SEQ ID NO: 5263 - DNA, 94 bp, Artificial Sequence
  Description of Artificial Sequence: Synthetic primer
aatgatacggcgaccaccgagatctacaccctatcctacactctttccctacacgacgctcttccgatcttttccttccagtggtgtttcagaa

SEQ ID NO: 5264 - DNA, 91 bp, Artificial Sequence
  Description of Artificial Sequence: Synthetic primer
aatgatacggcgaccaccgagatctacaccctatcctacactctttccctacacgacgctcttccgatctctggtagcgtggtcaggcttg

SEQ ID NO: 5265 - DNA, 95 bp, Artificial Sequence
  Description of Artificial Sequence: Synthetic primer
aatgatacggcgaccaccgagatctacaccctatcctacactctttccctacacgacgctcttccgatctacttccagctttatccagacctttc

SEQ ID NO: 5266 - DNA, 87 bp, Artificial Sequence
  Description of Artificial Sequence: Synthetic primer
aatgatacggcgaccaccgagatctacaccctatcctacactctttccctacacgacgctcttccgatcttgcgtgccacagcagga

SEQ ID NO: 5267 - DNA, 91 bp, Artificial Sequence
  Description of Artificial Sequence: Synthetic primer
aatgatacggcgaccaccgagatctacaccctatcctacactctttccctacacgacgctcttccgatctggaaaggtgagacaccgaggc

SEQ ID NO: 5268 - DNA, 98 bp, Artificial Sequence
  Description of Artificial Sequence: Synthetic primer
aatgatacggcgaccaccgagatctacaccctatcctacactctttccctacacgacgctcttccgatctttgcaataaagtggttttctgaacggga

SEQ ID NO: 5269 - DNA, 102 bp, Artificial Sequence
  Description of Artificial Sequence: Synthetic polynucleotide
aatgatacggcgaccaccgagatctacaccctatcctacactctttccctacacgacgctcttccgatctagtcactatcattccatttggtagtaaacatt

SEQ ID NO: 5270 - DNA, 100 bp, Artificial Sequence
  Description of Artificial Sequence: Synthetic polynucleotide
aatgatacggcgaccaccgagatctacaccctatcctacactctttccctacacgacgctcttccgatctaatattttagaaagggacaacagttaagct

SEQ ID NO: 5271 - DNA, 98 bp, Artificial Sequence
  Description of Artificial Sequence: Synthetic primer
aatgatacggcgaccaccgagatctacaccctatcctacactctttccctacacgacgctcttccgatctagtcctgtacttctggatctttaaccat

SEQ ID NO: 5272 - DNA, 96 bp, Artificial Sequence
  Description of Artificial Sequence: Synthetic primer
aatgatacggcgaccaccgagatctacaccctatcctacactctttccctacacgacgctcttccgatcttagacacaggtagaagactgcactat

SEQ ID NO: 5273 - DNA, 98 bp, Artificial Sequence
  Description of Artificial Sequence: Synthetic primer
aatgatacggcgaccaccgagatctacaccctatcctacactctttccctacacgacgctcttccgatcttacttgttctggtacacagtcatggttg

SEQ ID NO: 5274 - DNA, 103 bp, Artificial Sequence
  Description of Artificial Sequence: Synthetic polynucleotide
aatgatacggcgaccaccgagatctacaccctatcctacactctttccctacacgacgctcttccgatctacagatactcatcctcaatgtgattacttttta

SEQ ID NO: 5275 - DNA, 100 bp, Artificial Sequence
  Description of Artificial Sequence: Synthetic polynucleotide
aatgatacggcgaccaccgagatctacaccctatcctacactctttccctacacgacgctcttccgatctaaataataagcatcagcatttgactttacc

SEQ ID NO: 5276 - DNA, 105 bp, Artificial Sequence
  Description of Artificial Sequence: Synthetic polynucleotide
aatgatacggcgaccaccgagatctacaccctatcctacactctttccctacacgacgctcttccgatcttggatcatactgctaaacactaatataacctttgg

SEQ ID NO: 5277 - DNA, 102 bp, Artificial Sequence
  Description of Artificial Sequence: Synthetic polynucleotide
aatgatacggcgaccaccgagatctacaccctatcctacactctttccctacacgacgctcttccgatctaaaattcaatcagcggtataatcaggagtttt

SEQ ID NO: 5278 - DNA, 99 bp, Artificial Sequence
  Description of Artificial Sequence: Synthetic primer
aatgatacggcgaccaccgagatctacaccctatcctacactctttccctacacgacgctcttccgatctgtaacaccaatagggttcagcaaatcttc

SEQ ID NO: 5279 - DNA, 105 bp, Artificial Sequence
  Description of Artificial Sequence: Synthetic polynucleotide
aatgatacggcgaccaccgagatctacaccctatcctacactctttccctacacgacgctcttccgatctattgatacttaataaactcagtgatttgccttacc

SEQ ID NO: 5280 - DNA, 98 bp, Artificial Sequence
  Description of Artificial Sequence: Synthetic primer
aatgatacggcgaccaccgagatctacaccctatcctacactctttccctacacgacgctcttccgatctgaaacagagaatctccattttagcactt

SEQ ID NO: 5281 - DNA, 100 bp, Artificial Sequence
  Description of Artificial Sequence: Synthetic polynucleotide
aatgatacggcgaccaccgagatctacaccctatcctacactctttccctacacgacgctcttccgatctttatgtggactttctgagagaaaacaattt

SEQ ID NO: 5282 - DNA, 101 bp, Artificial Sequence
  Description of Artificial Sequence: Synthetic polynucleotide
aatgatacggcgaccaccgagatctacaccctatcctacactctttccctacacgacgctcttccgatctttacctgtactagctgaattaaatactgaga

SEQ ID NO: 5283 - DNA, 98 bp, Artificial Sequence
  Description of Artificial Sequence: Synthetic primer
aatgatacggcgaccaccgagatctacaccctatcctacactctttccctacacgacgctcttccgatctctcttccagccaaacataaacaaaagta

SEQ ID NO: 5284 - DNA, 97 bp, Artificial Sequence
  Description of Artificial Sequence: Synthetic primer
aatgatacggcgaccaccgagatctacaccctatcctacactctttccctacacgacgctcttccgatctggctaactgttttattgtgcatctcag

SEQ ID NO: 5285 - DNA, 99 bp, Artificial Sequence
  Description of Artificial Sequence: Synthetic primer
aatgatacggcgaccaccgagatctacaccctatcctacactctttccctacacgacgctcttccgatctagtgaaaagagtctcaaacacaaactaga

SEQ ID NO: 5286 - DNA, 102 bp, Artificial Sequence
  Description of Artificial Sequence: Synthetic polynucleotide
aatgatacggcgaccaccgagatctacaccctatcctacactctttccctacacgacgctcttccgatctgagagagagaagcataaattattgaacattct

SEQ ID NO: 5287 - DNA, 103 bp, Artificial Sequence
  Description of Artificial Sequence: Synthetic polynucleotide
aatgatacggcgaccaccgagatctacaccctatcctacactctttccctacacgacgctcttccgatctggttcataaatatcctgtgtataaaaagatagc

SEQ ID NO: 5288 - DNA, 95 bp, Artificial Sequence
  Description of Artificial Sequence: Synthetic primer
aatgatacggcgaccaccgagatctacaccctatcctacactctttccctacacgacgctcttccgatctcaggttgccttactggttacctacc

SEQ ID NO: 5289 - DNA, 98 bp, Artificial Sequence
  Description of Artificial Sequence: Synthetic primer
aatgatacggcgaccaccgagatctacaccctatcctacactctttccctacacgacgctcttccgatctaccgacagactcatctaacaaaaactta

SEQ ID NO: 5290 - DNA, 100 bp, Artificial Sequence
  Description of Artificial Sequence: Synthetic polynucleotide
aatgatacggcgaccaccgagatctacaccctatcctacactctttccctacacgacgctcttccgatcttgatgttactattgtgacgatctccaattc

SEQ ID NO: 5291 - DNA, 99 bp, Artificial Sequence
  Description of Artificial Sequence: Synthetic primer
aatgatacggcgaccaccgagatctacaccctatcctacactctttccctacacgacgctcttccgatctattgattgtttctaatagagcagccagaa

SEQ ID NO: 5292 - DNA, 95 bp, Artificial Sequence
  Description of Artificial Sequence: Synthetic primer
aatgatacggcgaccaccgagatctacaccctatcctacactctttccctacacgacgctcttccgatctagagccaagcatcattgagaaaaga

SEQ ID NO: 5293 - DNA, 98 bp, Artificial Sequence
  Description of Artificial Sequence: Synthetic primer
aatgatacggcgaccaccgagatctacaccctatcctacactctttccctacacgacgctcttccgatctctgctgagagttattaacagtgcagtgt

SEQ ID NO: 5294 - DNA, 93 bp, Artificial Sequence
  Description of Artificial Sequence: Synthetic primer
aatgatacggcgaccaccgagatctacaccctatcctacactctttccctacacgacgctcttccgatctcaggctaccctgagactgaccac

SEQ ID NO: 5295 - DNA, 91 bp, Artificial Sequence
  Description of Artificial Sequence: Synthetic primer
aatgatacggcgaccaccgagatctacaccctatcctacactctttccctacacgacgctcttccgatctttctaacccaccctcaccctc

SEQ ID NO: 5296 - DNA, 89 bp, Artificial Sequence
  Description of Artificial Sequence: Synthetic primer
aatgatacggcgaccaccgagatctacaccctatcctacactctttccctacacgacgctcttccgatctggcactacgaggcccagca

SEQ ID NO: 5297 - DNA, 97 bp, Artificial Sequence
  Description of Artificial Sequence: Synthetic primer
aatgatacggcgaccaccgagatctacaccctatcctacactctttccctacacgacgctcttccgatctatggacaagaacacttttaacatggaa

SEQ ID NO: 5298 - DNA, 89 bp, Artificial Sequence
  Description of Artificial Sequence: Synthetic primer
aatgatacggcgaccaccgagatctacaccctatcctacactctttccctacacgacgctcttccgatctcctgtcacagcgcgtgttc

SEQ ID NO: 5299 - DNA, 93 bp, Artificial Sequence
  Description of Artificial Sequence: Synthetic primer
aatgatacggcgaccaccgagatctacaccctatcctacactctttccctacacgacgctcttccgatctaggtgaagtccagcaacctgatc

SEQ ID NO: 5300 - DNA, 90 bp, Artificial Sequence
  Description of Artificial Sequence: Synthetic primer
aatgatacggcgaccaccgagatctacaccctatcctacactctttccctacacgacgctcttccgatctccactgaccactgtgtgccc

SEQ ID NO: 5301 - DNA, 91 bp, Artificial Sequence
  Description of Artificial Sequence: Synthetic primer
aatgatacggcgaccaccgagatctacaccctatcctacactctttccctacacgacgctcttccgatctcgtggtgttggcctgcacatt

SEQ ID NO: 5302 - DNA, 90 bp, Artificial Sequence
  Description of Artificial Sequence: Synthetic primer
aatgatacggcgaccaccgagatctacaccctatcctacactctttccctacacgacgctcttccgatcttctaccctgggctgctccta

SEQ ID NO: 5303 - DNA, 93 bp, Artificial Sequence
  Description of Artificial Sequence: Synthetic primer
aatgatacggcgaccaccgagatctacaccctatcctacactctttccctacacgacgctcttccgatctaggcctctgttcttcccgttttt

SEQ ID NO: 5304 - DNA, 101 bp, Artificial Sequence
  Description of Artificial Sequence: Synthetic polynucleotide
aatgatacggcgaccaccgagatctacaccctatcctacactctttccctacacgacgctcttccgatcttaatgtgttacaatcatttgccatttctagg

SEQ ID NO: 5305 - DNA, 99 bp, Artificial Sequence
  Description of Artificial Sequence: Synthetic primer
aatgatacggcgaccaccgagatctacaccctatcctacactctttccctacacgacgctcttccgatctctacacaggagtttcagtaacgtgaagta

SEQ ID NO: 5306 - DNA, 91 bp, Artificial Sequence
  Description of Artificial Sequence: Synthetic primer
aatgatacggcgaccaccgagatctacaccctatcctacactctttccctacacgacgctcttccgatcttccaggaagagtcagtggtgc

SEQ ID NO: 5307 - DNA, 91 bp, Artificial Sequence
  Description of Artificial Sequence: Synthetic primer
aatgatacggcgaccaccgagatctacaccctatcctacactctttccctacacgacgctcttccgatctcaagggacctgctctcccagt

SEQ ID NO: 5308 - DNA, 96 bp, Artificial Sequence
  Description of Artificial Sequence: Synthetic primer
aatgatacggcgaccaccgagatctacaccctatcctacactctttccctacacgacgctcttccgatctatgaaagcaccatttccctgtttcag

SEQ ID NO: 5309 - DNA, 94 bp, Artificial Sequence
  Description of Artificial Sequence: Synthetic primer
aatgatacggcgaccaccgagatctacaccctatcctacactctttccctacacgacgctcttccgatctggcatgttggtgacctctgaattt

SEQ ID NO: 5310 - DNA, 89 bp, Artificial Sequence
  Description of Artificial Sequence: Synthetic primer
aatgatacggcgaccaccgagatctacaccctatcctacactctttccctacacgacgctcttccgatcttccagtgcagctctcagcg

SEQ ID NO: 5311 - DNA, 98 bp, Artificial Sequence
  Description of Artificial Sequence: Synthetic primer
aatgatacggcgaccaccgagatctacaccctatcctacactctttccctacacgacgctcttccgatctgaatcatctgaattgcatctcgcatgtc

SEQ ID NO: 5312 - DNA, 98 bp, Artificial Sequence
  Description of Artificial Sequence: Synthetic primer
aatgatacggcgaccaccgagatctacaccctatcctacactctttccctacacgacgctcttccgatctagaatcacaacacattctaatgttcggc

SEQ ID NO: 5313 - DNA, 93 bp, Artificial Sequence
  Description of Artificial Sequence: Synthetic primer
aatgatacggcgaccaccgagatctacaccctatcctacactctttccctacacgacgctcttccgatctggcttgtggaagtgttcattgca

SEQ ID NO: 5314 - DNA, 91 bp, Artificial Sequence
  Description of Artificial Sequence: Synthetic primer
aatgatacggcgaccaccgagatctacaccctatcctacactctttccctacacgacgctcttccgatctgccttcccttggactgtgctg

SEQ ID NO: 5315 - DNA, 98 bp, Artificial Sequence
  Description of Artificial Sequence: Synthetic primer
aatgatacggcgaccaccgagatctacaccctatcctacactctttccctacacgacgctcttccgatctcttaatgcactggattttaacaaggcat

SEQ ID NO: 5316 - DNA, 102 bp, Artificial Sequence
  Description of Artificial Sequence: Synthetic polynucleotide
aatgatacggcgaccaccgagatctacaccctatcctacactctttccctacacgacgctcttccgatcttcttttcatggtctcgtctcctaatttctttt

SEQ ID NO: 5317 - DNA, 105 bp, Artificial Sequence
  Description of Artificial Sequence: Synthetic polynucleotide
aatgatacggcgaccaccgagatctacaccctatcctacactctttccctacacgacgctcttccgatcttatctttacccttgtttgattattacacctttgga

SEQ ID NO: 5318 - DNA, 102 bp, Artificial Sequence
  Description of Artificial Sequence: Synthetic polynucleotide
aatgatacggcgaccaccgagatctacaccctatcctacactctttccctacacgacgctcttccgatctcgaatttgcactaattttcttattacagtgag

SEQ ID NO: 5319 - DNA, 102 bp, Artificial Sequence
  Description of Artificial Sequence: Synthetic polynucleotide
aatgatacggcgaccaccgagatctacaccctatcctacactctttccctacacgacgctcttccgatcttaaaacatgagtttgcagtgattttgctattc

SEQ ID NO: 5320 - DNA, 93 bp, Artificial Sequence
  Description of Artificial Sequence: Synthetic primer
aatgatacggcgaccaccgagatctacaccctatcctacactctttccctacacgacgctcttccgatcttcactcctcccttctgcttcgtc

SEQ ID NO: 5321 - DNA, 89 bp, Artificial Sequence
  Description of Artificial Sequence: Synthetic primer
aatgatacggcgaccaccgagatctacaccctatcctacactctttccctacacgacgctcttccgatctccggaccgggactatctgc

SEQ ID NO: 5322 - DNA, 88 bp, Artificial Sequence
  Description of Artificial Sequence: Synthetic primer
aatgatacggcgaccaccgagatctacaccctatcctacactctttccctacacgacgctcttccgatctagcgtcctcgcaagccga

SEQ ID NO: 5323 - DNA, 90 bp, Artificial Sequence
  Description of Artificial Sequence: Synthetic primer
aatgatacggcgaccaccgagatctacaccctatcctacactctttccctacacgacgctcttccgatctctatggtgagtgcagccagc

SEQ ID NO: 5324 - DNA, 91 bp, Artificial Sequence
  Description of Artificial Sequence: Synthetic primer
aatgatacggcgaccaccgagatctacaccctatcctacactctttccctacacgacgctcttccgatctgtgaccctgacaggtcctgcc

SEQ ID NO: 5325 - DNA, 90 bp, Artificial Sequence
  Description of Artificial Sequence: Synthetic primer
aatgatacggcgaccaccgagatctacaccctatcctacactctttccctacacgacgctcttccgatctgggcaagttagccagcctca

SEQ ID NO: 5326 - DNA, 90 bp, Artificial Sequence
  Description of Artificial Sequence: Synthetic primer
aatgatacggcgaccaccgagatctacaccctatcctacactctttccctacacgacgctcttccgatctctgcctggtgcctacatcca

SEQ ID NO: 5327 - DNA, 94 bp, Artificial Sequence
  Description of Artificial Sequence: Synthetic primer
aatgatacggcgaccaccgagatctacaccctatcctacactctttccctacacgacgctcttccgatctcttcccaacagtcatggtaatccc

SEQ ID NO: 5328 - DNA, 90 bp, Artificial Sequence
  Description of Artificial Sequence: Synthetic primer
aatgatacggcgaccaccgagatctacaccctatcctacactctttccctacacgacgctcttccgatctcttctttgcggcgctgacag

SEQ ID NO: 5329 - DNA, 94 bp, Artificial Sequence
  Description of Artificial Sequence: Synthetic primer
aatgatacggcgaccaccgagatctacaccctatcctacactctttccctacacgacgctcttccgatctcagctccaggaccactctgttttc

SEQ ID NO: 5330 - DNA, 89 bp, Artificial Sequence
  Description of Artificial Sequence: Synthetic primer
aatgatacggcgaccaccgagatctacaccctatcctacactctttccctacacgacgctcttccgatctgccctgtctccctcaggtg

SEQ ID NO: 5331 - DNA, 93 bp, Artificial Sequence
  Description of Artificial Sequence: Synthetic primer
aatgatacggcgaccaccgagatctacaccctatcctacactctttccctacacgacgctcttccgatctgtccctctccctcttctcccttc

SEQ ID NO: 5332 - DNA, 89 bp, Artificial Sequence
  Description of Artificial Sequence: Synthetic primer
aatgatacggcgaccaccgagatctacaccctatcctacactctttccctacacgacgctcttccgatcttgcccagcctgtcatccct

SEQ ID NO: 5333 - DNA, 90 bp, Artificial Sequence
  Description of Artificial Sequence: Synthetic primer
aatgatacggcgaccaccgagatctacaccctatcctacactctttccctacacgacgctcttccgatctcacacaagccctgagcctga

SEQ ID NO: 5334 - DNA, 91 bp, Artificial Sequence
  Description of Artificial Sequence: Synthetic primer
aatgatacggcgaccaccgagatctacaccctatcctacactctttccctacacgacgctcttccgatctctttgaccaggactgggcttc

SEQ ID NO: 5335 - DNA, 94 bp, Artificial Sequence
  Description of Artificial Sequence: Synthetic primer
aatgatacggcgaccaccgagatctacaccctatcctacactctttccctacacgacgctcttccgatctgtctccagcttagttgctacatcc

SEQ ID NO: 5336 - DNA, 89 bp, Artificial Sequence
  Description of Artificial Sequence: Synthetic primer
aatgatacggcgaccaccgagatctacaccctatcctacactctttccctacacgacgctcttccgatctccagctcagcccttggagt

SEQ ID NO: 5337 - DNA, 89 bp, Artificial Sequence
  Description of Artificial Sequence: Synthetic primer
aatgatacggcgaccaccgagatctacaccctatcctacactctttccctacacgacgctcttccgatctcagactggagacgcccagg

SEQ ID NO: 5338 - DNA, 94 bp, Artificial Sequence; identical to SEQ ID NO: 5335
  Description of Artificial Sequence: Synthetic primer

SEQ ID NO: 5339 - DNA, 95 bp, Artificial Sequence
  Description of Artificial Sequence: Synthetic primer
aatgatacggcgaccaccgagatctacaccctatcctacactctttccctacacgacgctcttccgatctccaccagctaatagaaccctatcct

SEQ ID NO: 5340 - DNA, 91 bp, Artificial Sequence
  Description of Artificial Sequence: Synthetic primer
aatgatacggcgaccaccgagatctacaccctatcctacactctttccctacacgacgctcttccgatctccagaagggcagagagggctt

SEQ ID NO: 5341 - DNA, 96 bp, Artificial Sequence
  Description of Artificial Sequence: Synthetic primer
aatgatacggcgaccaccgagatctacaccctatcctacactctttccctacacgacgctcttccgatcttgtcatccactctctacctcttccag

SEQ ID NO: 5342 - DNA, 89 bp, Artificial Sequence
  Description of Artificial Sequence: Synthetic primer
aatgatacggcgaccaccgagatctacaccctatcctacactctttccctacacgacgctcttccgatctcctgacggatgtggtgcct

SEQ ID NO: 5343 - DNA, 92 bp, Artificial Sequence
  Description of Artificial Sequence: Synthetic primer
aatgatacggcgaccaccgagatctacaccctatcctacactctttccctacacgacgctcttccgatctccttctgacccactgggctctg

SEQ ID NO: 5344 - DNA, 93 bp, Artificial Sequence
  Description of Artificial Sequence: Synthetic primer
aatgatacggcgaccaccgagatctacaccctatcctacactctttccctacacgacgctcttccgatctagcttcatccagccttcattccc

SEQ ID NO: 5345 - DNA, 89 bp, Artificial Sequence; identical to SEQ ID NO: 5342
  Description of Artificial Sequence: Synthetic primer

SEQ ID NO: 5346 - DNA, 93 bp, Artificial Sequence
  Description of Artificial Sequence: Synthetic primer
aatgatacggcgaccaccgagatctacaccctatcctacactctttccctacacgacgctcttccgatcttccctgctctgctcaggtgattc

SEQ ID NO: 5347 - DNA, 90 bp, Artificial Sequence
  Description of Artificial Sequence: Synthetic primer
aatgatacggcgaccaccgagatctacaccctatcctacactctttccctacacgacgctcttccgatctctcccttgtgacctgagggc

SEQ ID NO: 5348 - DNA, 91 bp, Artificial Sequence
  Description of Artificial Sequence: Synthetic primer
aatgatacggcgaccaccgagatctacaccctatcctacactctttccctacacgacgctcttccgatctctctgggaatcggcgtggatg

SEQ ID NO: 5349 - DNA, 90 bp, Artificial Sequence
  Description of Artificial Sequence: Synthetic primer
aatgatacggcgaccaccgagatctacaccctatcctacactctttccctacacgacgctcttccgatctccctgagactgccctttccc

SEQ ID NO: 5350 - DNA, 90 bp, Artificial Sequence
  Description of Artificial Sequence: Synthetic primer
aatgatacggcgaccaccgagatctacaccctatcctacactctttccctacacgacgctcttccgatctggtactgctggtggccctgg

SEQ ID NO: 5351 - DNA, 90 bp, Artificial Sequence
  Description of Artificial Sequence: Synthetic primer
aatgatacggcgaccaccgagatctacaccctatcctacactctttccctacacgacgctcttccgatcttgtttgggccagctctgacc

SEQ ID NO: 5352 - DNA, 89 bp, Artificial Sequence
  Description of Artificial Sequence: Synthetic primer
aatgatacggcgaccaccgagatctacaccctatcctacactctttccctacacgacgctcttccgatctcccacctccaaccagtgcc

SEQ ID NO: 5353 - DNA, 90 bp, Artificial Sequence; identical to SEQ ID NO: 5351
  Description of Artificial Sequence: Synthetic primer

SEQ ID NO: 5354 - DNA, 91 bp, Artificial Sequence
  Description of Artificial Sequence: Synthetic primer
aatgatacggcgaccaccgagatctacaccctatcctacactctttccctacacgacgctcttccgatctctgtgtgaccatgctgcggtg

SEQ ID NO: 5355 - DNA, 95 bp, Artificial Sequence
  Description of Artificial Sequence: Synthetic primer
aatgatacggcgaccaccgagatctacaccctatcctacactctttccctacacgacgctcttccgatcttgactatcagacacatgacattggc

SEQ ID NO: 5356 - DNA, 93 bp, Artificial Sequence
  Description of Artificial Sequence: Synthetic primer
aatgatacggcgaccaccgagatctacaccctatcctacactctttccctacacgacgctcttccgatctgacactcagttatccacggccag

SEQ ID NO: 5357 - DNA, 92 bp, Artificial Sequence
  Description of Artificial Sequence: Synthetic primer
aatgatacggcgaccaccgagatctacaccctatcctacactctttccctacacgacgctcttccgatctgcagagcaccttcttgctgatg

SEQ ID NO: 5358 - DNA, 93 bp, Artificial Sequence; identical to SEQ ID NO: 5356
  Description of Artificial Sequence: Synthetic primer

SEQ ID NO: 5359 - DNA, 91 bp, Artificial Sequence
  Description of Artificial Sequence: Synthetic primer
aatgatacggcgaccaccgagatctacaccctatcctacactctttccctacacgacgctcttccgatctgtccctgaccctcaccaacta

SEQ ID NO: 5360 - DNA, 95 bp, Artificial Sequence
  Description of Artificial Sequence: Synthetic primer
aatgatacggcgaccaccgagatctacaccctatcctacactctttccctacacgacgctcttccgatctactttttctgtagcgtgggaggact

SEQ ID NO: 5361 - DNA, 93 bp, Artificial Sequence
  Description of Artificial Sequence: Synthetic primer
aatgatacggcgaccaccgagatctacaccctatcctacactctttccctacacgacgctcttccgatctctttctctgtttgctctggcagt

SEQ ID NO: 5362 - DNA, 94 bp, Artificial Sequence
  Description of Artificial Sequence: Synthetic primer
aatgatacggcgaccaccgagatctacaccctatcctacactctttccctacacgacgctcttccgatctctattgcaggtcctgggatttgaa

SEQ ID NO: 5363 - DNA, 93 bp, Artificial Sequence; identical to SEQ ID NO: 5361
  Description of Artificial Sequence: Synthetic primer

SEQ ID NO: 5364 - DNA, 90 bp, Artificial Sequence
  Description of Artificial Sequence: Synthetic primer
aatgatacggcgaccaccgagatctacaccctatcctacactctttccctacacgacgctcttccgatctttgcagtgatgcctggctga

SEQ ID NO: 5365 - DNA, 90 bp, Artificial Sequence
  Description of Artificial Sequence: Synthetic primer
aatgatacggcgaccaccgagatctacaccctatcctacactctttccctacacgacgctcttccgatcttgggagcgcccagataacgc

SEQ ID NO: 5366 - DNA, 101 bp, Artificial Sequence
  Description of Artificial Sequence: Synthetic polynucleotide
aatgatacggcgaccaccgagatctacaccctatcctacactctttccctacacgacgctcttccgatctcgttctaagagagtgacagaaaggtaaagag

SEQ ID NO: 5367 - DNA, 105 bp, Artificial Sequence
  Description of Artificial Sequence: Synthetic polynucleotide
aatgatacggcgaccaccgagatctacaccctatcctacactctttccctacacgacgctcttccgatctgtggcttagaaatcttttctaaatgaaaacacaac

SEQ ID NO: 5368 - DNA, 103 bp, Artificial Sequence
  Description of Artificial Sequence: Synthetic polynucleotide
aatgatacggcgaccaccgagatctacaccctatcctacactctttccctacacgacgctcttccgatctcactctaacaagcagataactttcacttaatag

SEQ ID NO: 5369 - DNA, 98 bp, Artificial Sequence
  Description of Artificial Sequence: Synthetic primer
aatgatacggcgaccaccgagatctacaccctatcctacactctttccctacacgacgctcttccgatcttgacagtaagatacagtctatcgggttt

SEQ ID NO: 5370 - DNA, 97 bp, Artificial Sequence
  Description of Artificial Sequence: Synthetic primer
aatgatacggcgaccaccgagatctacaccctatcctacactctttccctacacgacgctcttccgatcttttgataagttctagctgtggtgggtt

SEQ ID NO: 5371 - DNA, 98 bp, Artificial Sequence
  Description of Artificial Sequence: Synthetic primer
aatgatacggcgaccaccgagatctacaccctatcctacactctttccctacacgacgctcttccgatctaaattctcagatccaggaagaggaaagg

SEQ ID NO: 5372 - DNA, 98 bp, Artificial Sequence
  Description of Artificial Sequence: Synthetic primer
aatgatacggcgaccaccgagatctacaccctatcctacactctttccctacacgacgctcttccgatctggaaggatgagaatttcaagcacttact

SEQ ID NO: 5373 - DNA, 100 bp, Artificial Sequence
  Description of Artificial Sequence: Synthetic polynucleotide
aatgatacggcgaccaccgagatctacaccctatcctacactctttccctacacgacgctcttccgatctctgtccttattttggatatttctcccaatg

SEQ ID NO: 5374 - DNA, 100 bp, Artificial Sequence
  Description of Artificial Sequence: Synthetic polynucleotide
aatgatacggcgaccaccgagatctacaccctatcctacactctttccctacacgacgctcttccgatctggtcctggtatgaagaatgtatttacccaa

SEQ ID NO: 5375 - DNA, 101 bp, Artificial Sequence
  Description of Artificial Sequence: Synthetic polynucleotide
aatgatacggcgaccaccgagatctacaccctatcctacactctttccctacacgacgctcttccgatctttaaacacacatcacatacatacaagtcaac

SEQ ID NO: 5376 - DNA, 99 bp, Artificial Sequence
  Description of Artificial Sequence: Synthetic primer
aatgatacggcgaccaccgagatctacaccctatcctacactctttccctacacgacgctcttccgatctagtttattttcatggtgttttatccctct

SEQ ID NO: 5377 - DNA, 94 bp, Artificial Sequence
  Description of Artificial Sequence: Synthetic primer
aatgatacggcgaccaccgagatctacaccctatcctacactctttccctacacgacgctcttccgatctaacgttgaaccattgtgtctcaca

SEQ ID NO: 5378 - DNA, 95 bp, Artificial Sequence
  Description of Artificial Sequence: Synthetic primer
aatgatacggcgaccaccgagatctacaccctatcctacactctttccctacacgacgctcttccgatctcaagtgaaacgtgtttgtcaagtca

SEQ ID NO: 5379 - DNA, 103 bp, Artificial Sequence
  Description of Artificial Sequence: Synthetic polynucleotide
aatgatacggcgaccaccgagatctacaccctatcctacactctttccctacacgacgctcttccgatctgctaaatgtttgacttcaggatatggtttgaat

SEQ ID NO: 5380 - DNA, 100 bp, Artificial Sequence
  Description of Artificial Sequence: Synthetic polynucleotide
aatgatacggcgaccaccgagatctacaccctatcctacactctttccctacacgacgctcttccgatctgctagggactttattttgtttttgtattgt

SEQ ID NO: 5381 - DNA, 93 bp, Artificial Sequence
  Description of Artificial Sequence: Synthetic primer
aatgatacggcgaccaccgagatctacaccctatcctacactctttccctacacgacgctcttccgatctatgaagcacagcaaagtgaaggg

SEQ ID NO: 5382 - DNA, 89 bp, Artificial Sequence
  Description of Artificial Sequence: Synthetic primer
aatgatacggcgaccaccgagatctacaccctatcctacactctttccctacacgacgctcttccgatctcccagacacgggcagtcac

SEQ ID NO: 5383 - DNA, 90 bp, Artificial Sequence
  Description of Artificial Sequence: Synthetic primer
aatgatacggcgaccaccgagatctacaccctatcctacactctttccctacacgacgctcttccgatctgaccctcttctccgtccacg

SEQ ID NO: 5384 - DNA, 100 bp, Artificial Sequence
  Description of Artificial Sequence: Synthetic polynucleotide
aatgatacggcgaccaccgagatctacaccctatcctacactctttccctacacgacgctcttccgatctagagtgagacgctgtctgaaaataataatt

SEQ ID NO: 5385 - DNA, 102 bp, Artificial Sequence
  Description of Artificial Sequence: Synthetic polynucleotide
aatgatacggcgaccaccgagatctacaccctatcctacactctttccctacacgacgctcttccgatctctgggaacatttgtcatttattcttttctact

SEQ ID NO: 5386 - DNA, 99 bp, Artificial Sequence
  Description of Artificial Sequence: Synthetic primer
aatgatacggcgaccaccgagatctacaccctatcctacactctttccctacacgacgctcttccgatcttgtgatcgtatttctaatccctttcactc

SEQ ID NO: 5387 - DNA, 102 bp, Artificial Sequence
  Description of Artificial Sequence: Synthetic polynucleotide
aatgatacggcgaccaccgagatctacaccctatcctacactctttccctacacgacgctcttccgatcttccactctgtctttattaggaagtaactgtga

SEQ ID NO: 5388 - DNA, 100 bp, Artificial Sequence
  Description of Artificial Sequence: Synthetic polynucleotide
aatgatacggcgaccaccgagatctacaccctatcctacactctttccctacacgacgctcttccgatcttggatgttgtaacttgagctgtgtaattcc

SEQ ID NO: 5389 - DNA, 94 bp, Artificial Sequence
  Description of Artificial Sequence: Synthetic primer
aatgatacggcgaccaccgagatctacaccctatcctacactctttccctacacgacgctcttccgatctggtctctcactgaacacaccatgc

SEQ ID NO: 5390 - DNA, 100 bp, Artificial Sequence
  Description of Artificial Sequence: Synthetic polynucleotide
aatgatacggcgaccaccgagatctacaccctatcctacactctttccctacacgacgctcttccgatctttcagctctgaaacatcacacatctaagat

SEQ ID NO: 5391 - DNA, 102 bp, Artificial Sequence
  Description of Artificial Sequence: Synthetic polynucleotide
aatgatacggcgaccaccgagatctacaccctatcctacactctttccctacacgacgctcttccgatctctgatagcatgggtccgtttttaataaatatg

SEQ ID NO: 5392 - DNA, 101 bp, Artificial Sequence
  Description of Artificial Sequence: Synthetic polynucleotide
aatgatacggcgaccaccgagatctacaccctatcctacactctttccctacacgacgctcttccgatctgctgaatacttgatttgtttcttgtaactga

SEQ ID NO: 5393 - DNA, 91 bp, Artificial Sequence
  Description of Artificial Sequence: Synthetic primer
aatgatacggcgaccaccgagatctacaccctatcctacactctttccctacacgacgctcttccgatctcctggagggaactttcccagt

SEQ ID NO: 5394 - DNA, 88 bp, Artificial Sequence
  Description of Artificial Sequence: Synthetic primer
aatgatacggcgaccaccgagatctacaccctatcctacactctttccctacacgacgctcttccgatcttaaccgaacgcggcggtg

SEQ ID NO: 5395 - DNA, 99 bp, Artificial Sequence
  Description of Artificial Sequence: Synthetic primer
aatgatacggcgaccaccgagatctacaccctatcctacactctttccctacacgacgctcttccgatctaccacttcctacctagaaaacactctcag

SEQ ID NO: 5396 - DNA, 91 bp, Artificial Sequence
  Description of Artificial Sequence: Synthetic primer
aatgatacggcgaccaccgagatctacaccctatcctacactctttccctacacgacgctcttccgatctgggagcagcagactttgtggt

SEQ ID NO: 5397 - DNA, 99 bp, Artificial Sequence
  Description of Artificial Sequence: Synthetic primer
aatgatacggcgaccaccgagatctacaccctatcctacactctttccctacacgacgctcttccgatctgaaaaatcacccaaaggtaacatcttgcc

SEQ ID NO: 5398 - DNA, 93 bp, Artificial Sequence
  Description of Artificial Sequence: Synthetic primer
aatgatacggcgaccaccgagatctacaccctatcctacactctttccctacacgacgctcttccgatctgcttgagctttccaatctgctca

SEQ ID NO: 5399 - DNA, 103 bp, Artificial Sequence
  Description of Artificial Sequence: Synthetic polynucleotide
aatgatacggcgaccaccgagatctacaccctatcctacactctttccctacacgacgctcttccgatcttctcctccactaaaaataggatataacaactca

SEQ ID NO: 5400 - DNA, 100 bp, Artificial Sequence
  Description of Artificial Sequence: Synthetic polynucleotide
aatgatacggcgaccaccgagatctacaccctatcctacactctttccctacacgacgctcttccgatctggaatcaaaatctccaagagtgactattac

SEQ ID NO: 5401 - DNA, 98 bp, Artificial Sequence
  Description of Artificial Sequence: Synthetic primer
aatgatacggcgaccaccgagatctacaccctatcctacactctttccctacacgacgctcttccgatcttaggctagaaatgtatggtcagaaaaca

SEQ ID NO: 5402 - DNA, 100 bp, Artificial Sequence
  Description of Artificial Sequence: Synthetic polynucleotide
aatgatacggcgaccaccgagatctacaccctatcctacactctttccctacacgacgctcttccgatctttagcagaaaagaagtttctgtgatttacc

SEQ ID NO: 5403 - DNA, 95 bp, Artificial Sequence
  Description of Artificial Sequence: Synthetic primer
aatgatacggcgaccaccgagatctacaccctatcctacactctttccctacacgacgctcttccgatctaccatcaacagttcccaaagtctct

SEQ ID NO: 5404 - DNA, 90 bp, Artificial Sequence
  Description of Artificial Sequence: Synthetic primer
aatgatacggcgaccaccgagatctacaccctatcctacactctttccctacacgacgctcttccgatctggagacagggacaggctgtg

SEQ ID NO: 5405 - DNA, 100 bp, Artificial Sequence
  Description of Artificial Sequence: Synthetic polynucleotide
aatgatacggcgaccaccgagatctacaccctatcctacactctttccctacacgacgctcttccgatctttcgtgagcactttccttccataaactaaa

SEQ ID NO: 5406 - DNA, 96 bp, Artificial Sequence
  Description of Artificial Sequence: Synthetic primer
aatgatacggcgaccaccgagatctacaccctatcctacactctttccctacacgacgctcttccgatctctagcaagagaatgagaatccgcatg

SEQ ID NO: 5407 - DNA, 97 bp, Artificial Sequence
  Description of Artificial Sequence: Synthetic primer
aatgatacggcgaccaccgagatctacaccctatcctacactctttccctacacgacgctcttccgatctcaggtaaaaagaatttccttcagcact

SEQ ID NO: 5408 - DNA, 95 bp, Artificial Sequence
  Description of Artificial Sequence: Synthetic primer
aatgatacggcgaccaccgagatctacaccctatcctacactctttccctacacgacgctcttccgatctgtgctgaagttttggcaggttttct

SEQ ID NO: 5409 - DNA, 91 bp, Artificial Sequence
  Description of Artificial Sequence: Synthetic primer
aatgatacggcgaccaccgagatctacaccctatcctacactctttccctacacgacgctcttccgatctctgctctgggtcctcctcagg

SEQ ID NO: 5410 - DNA, 94 bp, Artificial Sequence
  Description of Artificial Sequence: Synthetic primer
aatgatacggcgaccaccgagatctacaccctatcctacactctttccctacacgacgctcttccgatctagaacccagaatcctgtcaccatt

SEQ ID NO: 5411 - DNA, 98 bp, Artificial Sequence
  Description of Artificial Sequence: Synthetic primer
aatgatacggcgaccaccgagatctacaccctatcctacactctttccctacacgacgctcttccgatcttctgacataatgcagtaaaatcaggttc

SEQ ID NO: 5412 - DNA, 105 bp, Artificial Sequence
  Description of Artificial Sequence: Synthetic polynucleotide
aatgatacggcgaccaccgagatctacaccctatcctacactctttccctacacgacgctcttccgatctcctctgggtaatggaattattattagcttttattg

SEQ ID NO: 5413 - DNA, 102 bp, Artificial Sequence
  Description of Artificial Sequence: Synthetic polynucleotide
aatgatacggcgaccaccgagatctacaccctatcctacactctttccctacacgacgctcttccgatctccttttatggcagaggcttatatttatacaag

SEQ ID NO: 5414 - DNA, 103 bp, Artificial Sequence
  Description of Artificial Sequence: Synthetic polynucleotide
aatgatacggcgaccaccgagatctacaccctatcctacactctttccctacacgacgctcttccgatcttcccagaatctaattgtgaacaatgacataaaa

SEQ ID NO: 5415 - DNA, 101 bp, Artificial Sequence
  Description of Artificial Sequence: Synthetic polynucleotide
aatgatacggcgaccaccgagatctacaccctatcctacactctttccctacacgacgctcttccgatctgtgaaaaataacattctgtgaactacttacg

SEQ ID NO: 5416 - DNA, 102 bp, Artificial Sequence
  Description of Artificial Sequence: Synthetic polynucleotide
aatgatacggcgaccaccgagatctacaccctatcctacactctttccctacacgacgctcttccgatctgggaatttagtccaaaggaatgccaatttaat

SEQ ID NO: 5417 - DNA, 102 bp, Artificial Sequence
  Description of Artificial Sequence: Synthetic polynucleotide
aatgatacggcgaccaccgagatctacaccctatcctacactctttccctacacgacgctcttccgatctaataagcaactgctgaatgagaaagtaaaagg

SEQ ID NO: 5418 - DNA, 102 bp, Artificial Sequence
  Description of Artificial Sequence: Synthetic polynucleotide
aatgatacggcgaccaccgagatctacaccctatcctacactctttccctacacgacgctcttccgatcttgttagggagaacttacatctaaatctacttt

SEQ ID NO: 5419 - DNA, 95 bp, Artificial Sequence
  Description of Artificial Sequence: Synthetic primer
aatgatacggcgaccaccgagatctacaccctatcctacactctttccctacacgacgctcttccgatctcctccctccacagtctcaaaacatt

SEQ ID NO: 5420 - DNA, 102 bp, Artificial Sequence
  Description of Artificial Sequence: Synthetic polynucleotide
aatgatacggcgaccaccgagatctacaccctatcctacactctttccctacacgacgctcttccgatctgcaaatcaatcaaatataccatgtgcaatacc

SEQ ID NO: 5421 - DNA, 102 bp, Artificial Sequence
  Description of Artificial Sequence: Synthetic polynucleotide
aatgatacggcgaccaccgagatctacaccctatcctacactctttccctacacgacgctcttccgatctcaaatctgaaacactataaagccatgaataac

SEQ ID NO: 5422 - DNA, 103 bp, Artificial Sequence
  Description of Artificial Sequence: Synthetic polynucleotide
aatgatacggcgaccaccgagatctacaccctatcctacactctttccctacacgacgctcttccgatctgttaaaataggaaatcagattttctgaaggttg

SEQ ID NO: 5423 - DNA, 100 bp, Artificial Sequence
  Description of Artificial Sequence: Synthetic polynucleotide
aatgatacggcgaccaccgagatctacaccctatcctacactctttccctacacgacgctcttccgatctcttaaaagtagccagagagaaaaagacaga

SEQ ID NO: 5424 - DNA, 99 bp, Artificial Sequence
  Description of Artificial Sequence: Synthetic primer
aatgatacggcgaccaccgagatctacaccctatcctacactctttccctacacgacgctcttccgatctacgaactggaaagatgctgcttttaatat

SEQ ID NO: 5425 - DNA, 88 bp, Artificial Sequence
  Description of Artificial Sequence: Synthetic primer
aatgatacggcgaccaccgagatctacaccctatcctacactctttccctacacgacgctcttccgatctccgcgcccggctgaaatt

SEQ ID NO: 5426 - DNA, 100 bp, Artificial Sequence
  Description of Artificial Sequence: Synthetic polynucleotide
aatgatacggcgaccaccgagatctacaccctatcctacactctttccctacacgacgctcttccgatctccaaagaaacacaccacattttaactttaa

SEQ ID NO: 5427 - DNA, 100 bp, Artificial Sequence
  Description of Artificial Sequence: Synthetic polynucleotide
aatgatacggcgaccaccgagatctacaccctatcctacactctttccctacacgacgctcttccgatctgaaagacaaatctgttccagaatcaagatt

SEQ ID NO: 5428 - DNA, 103 bp, Artificial Sequence
  Description of Artificial Sequence: Synthetic polynucleotide
aatgatacggcgaccaccgagatctacaccctatcctacactctttccctacacgacgctcttccgatctaagaaacacctctcactaacaataatttgttag

SEQ ID NO: 5429 - DNA, 99 bp, Artificial Sequence
  Description of Artificial Sequence: Synthetic primer
aatgatacggcgaccaccgagatctacaccctatcctacactctttccctacacgacgctcttccgatcttgcttaaaatctatttgcagtttgaatgg

SEQ ID NO: 5430 - DNA, 100 bp, Artificial Sequence
  Description of Artificial Sequence: Synthetic polynucleotide
aatgatacggcgaccaccgagatctacaccctatcctacactctttccctacacgacgctcttccgatcttttcagagtccatgctcttgaaaataatca

SEQ ID NO: 5431 - DNA, 96 bp, Artificial Sequence
  Description of Artificial Sequence: Synthetic primer
aatgatacggcgaccaccgagatctacaccctatcctacactctttccctacacgacgctcttccgatctaagtagggaggagagaaggtgaagtg

SEQ ID NO: 5432 - DNA, 103 bp, Artificial Sequence
  Description of Artificial Sequence: Synthetic polynucleotide
aatgatacggcgaccaccgagatctacaccctatcctacactctttccctacacgacgctcttccgatctgagatcaaatgaattacctatgttatgttatgg

SEQ ID NO: 5433 - DNA, 105 bp, Artificial Sequence
  Description of Artificial Sequence: Synthetic polynucleotide
aatgatacggcgaccaccgagatctacaccctatcctacactctttccctacacgacgctcttccgatcttgcatgaagaccgagttatagaatactataataga

SEQ ID NO: 5434 - DNA, 103 bp, Artificial Sequence
  Description of Artificial Sequence: Synthetic polynucleotide
aatgatacggcgaccaccgagatctacaccctatcctacactctttccctacacgacgctcttccgatctctcattctttactacttccctaaagagaaaaca

SEQ ID NO: 5435 - DNA, 102 bp, Artificial Sequence
  Description of Artificial Sequence: Synthetic polynucleotide
aatgatacggcgaccaccgagatctacaccctatcctacactctttccctacacgacgctcttccgatctgaggtgtttgaataactgcatttggaaattca

SEQ ID NO: 5436 - DNA, 95 bp, Artificial Sequence
  Description of Artificial Sequence: Synthetic primer
aatgatacggcgaccaccgagatctacaccctatcctacactctttccctacacgacgctcttccgatcttcggctactggaaaacattcaaaac

SEQ ID NO: 5437 - DNA, 99 bp, Artificial Sequence
  Description of Artificial Sequence: Synthetic primer
aatgatacggcgaccaccgagatctacaccctatcctacactctttccctacacgacgctcttccgatctcgaaaagacttcttgcagtgtaaacaatt

SEQ ID NO: 5438 - DNA, 98 bp, Artificial Sequence
  Description of Artificial Sequence: Synthetic primer
aatgatacggcgaccaccgagatctacaccctatcctacactctttccctacacgacgctcttccgatctcatctgtgagagacaatgaatccagagg

SEQ ID NO: 5439 - DNA, 91 bp, Artificial Sequence
  Description of Artificial Sequence: Synthetic primer
aatgatacggcgaccaccgagatctacaccctatcctacactctttccctacacgacgctcttccgatctagaaaggcgcttctgaacgcg

SEQ ID NO: 5440 - DNA, 89 bp, Artificial Sequence
  Description of Artificial Sequence: Synthetic primer
aatgatacggcgaccaccgagatctacaccctatcctacactctttccctacacgacgctcttccgatctggacgtacagcaagggcgt

SEQ ID NO: 5441 - DNA, 90 bp, Artificial Sequence
  Description of Artificial Sequence: Synthetic primer
aatgatacggcgaccaccgagatctacaccctatcctacactctttccctacacgacgctcttccgatcttgataagggcggcttgagga

SEQ ID NO: 5442 - DNA, 89 bp, Artificial Sequence
  Description of Artificial Sequence: Synthetic primer
aatgatacggcgaccaccgagatctacaccctatcctacactctttccctacacgacgctcttccgatctcactcgccctcacgaaggg

SEQ ID NO: 5443 - DNA, 90 bp, Artificial Sequence
  Description of Artificial Sequence: Synthetic primer
aatgatacggcgaccaccgagatctacaccctatcctacactctttccctacacgacgctcttccgatctgcaagaccagcagtagcagg

SEQ ID NO: 5444 - DNA, 89 bp, Artificial Sequence
  Description of Artificial Sequence: Synthetic primer
aatgatacggcgaccaccgagatctacaccctatcctacactctttccctacacgacgctcttccgatctcgtgctcacctccaggctg

SEQ ID NO: 5445 - DNA, 92 bp, Artificial Sequence
  Description of Artificial Sequence: Synthetic primer
aatgatacggcgaccaccgagatctacaccctatcctacactctttccctacacgacgctcttccgatctacactgggtagaccacagcacg

SEQ ID NO: 5446 - DNA, 91 bp, Artificial Sequence
  Description of Artificial Sequence: Synthetic primer
aatgatacggcgaccaccgagatctacaccctatcctacactctttccctacacgacgctcttccgatctgcgagcacctcatttcctggg

SEQ ID NO: 5447 - DNA, 96 bp, Artificial Sequence
  Description of Artificial Sequence: Synthetic primer
aatgatacggcgaccaccgagatctacaccctatcctacactctttccctacacgacgctcttccgatctccatgtcccttggcctttcaatcttc

SEQ ID NO: 5448 - DNA, 90 bp, Artificial Sequence
  Description of Artificial Sequence: Synthetic primer
aatgatacggcgaccaccgagatctacaccctatcctacactctttccctacacgacgctcttccgatctctccctggagcaggcactca

SEQ ID NO: 5449 - DNA, 89 bp, Artificial Sequence
  Description of Artificial Sequence: Synthetic primer
aatgatacggcgaccaccgagatctacaccctatcctacactctttccctacacgacgctcttccgatctcctcccttgggcgtttcca

SEQ ID NO: 5450 - DNA, 95 bp, Artificial Sequence
  Description of Artificial Sequence: Synthetic primer
aatgatacggcgaccaccgagatctacaccctatcctacactctttccctacacgacgctcttccgatctatgccctgattaaaccctgcttacg

SEQ ID NO: 5451 - DNA, 90 bp, Artificial Sequence
  Description of Artificial Sequence: Synthetic primer
aatgatacggcgaccaccgagatctacaccctatcctacactctttccctacacgacgctcttccgatctctgggaggtggtggtggtcc

SEQ ID NO: 5452 - DNA, 91 bp, Artificial Sequence
  Description of Artificial Sequence: Synthetic primer
aatgatacggcgaccaccgagatctacaccctatcctacactctttccctacacgacgctcttccgatctacagcagcaccgagacgatga

SEQ ID NO: 5453 - DNA, 89 bp, Artificial Sequence
  Description of Artificial Sequence: Synthetic primer
aatgatacggcgaccaccgagatctacaccctatcctacactctttccctacacgacgctcttccgatcttggcctccctccctggaag

SEQ ID NO: 5454 - DNA, 88 bp, Artificial Sequence
  Description of Artificial Sequence: Synthetic primer
aatgatacggcgaccaccgagatctacaccctatcctacactctttccctacacgacgctcttccgatctactgtgcctgtgcctggc

SEQ ID NO: 5455 - DNA, 88 bp, Artificial Sequence
  Description of Artificial Sequence: Synthetic primer
aatgatacggcgaccaccgagatctacaccctatcctacactctttccctacacgacgctcttccgatcttgcccacctcaccctgca

SEQ ID NO: 5456 - DNA, 90 bp, Artificial Sequence
  Description of Artificial Sequence: Synthetic primer
aatgatacggcgaccaccgagatctacaccctatcctacactctttccctacacgacgctcttccgatctggctgggtgcagagccatat

SEQ ID NO: 5457 - DNA, 89 bp, Artificial Sequence
  Description of Artificial Sequence: Synthetic primer
aatgatacggcgaccaccgagatctacaccctatcctacactctttccctacacgacgctcttccgatctttcccaagggcactgcctg

SEQ ID NO: 5458 - DNA, 92 bp, Artificial Sequence
  Description of Artificial Sequence: Synthetic primer
aatgatacggcgaccaccgagatctacaccctatcctacactctttccctacacgacgctcttccgatctggtgtttctgtaacctccaccc

SEQ ID NO: 5459 - DNA, 90 bp, Artificial Sequence
  Description of Artificial Sequence: Synthetic primer
aatgatacggcgaccaccgagatctacaccctatcctacactctttccctacacgacgctcttccgatctcccaagtgaggctgggccaa

SEQ ID NO: 5460 - DNA, 93 bp, Artificial Sequence
  Description of Artificial Sequence: Synthetic primer
aatgatacggcgaccaccgagatctacaccctatcctacactctttccctacacgacgctcttccgatctcagcttgtgggaattggacccag

SEQ ID NO: 5461 - DNA, 97 bp, Artificial Sequence
  Description of Artificial Sequence: Synthetic primer
aatgatacggcgaccaccgagatctacaccctatcctacactctttccctacacgacgctcttccgatcttttaaaaagcatcacagagaggaagga

SEQ ID NO: 5462 - DNA, 101 bp, Artificial Sequence
  Description of Artificial Sequence: Synthetic polynucleotide
aatgatacggcgaccaccgagatctacaccctatcctacactctttccctacacgacgctcttccgatctttgtgagtccattacctttcacaaagaaatg

SEQ ID NO: 5463 - DNA, 88 bp, Artificial Sequence
  Description of Artificial Sequence: Synthetic primer
aatgatacggcgaccaccgagatctacaccctatcctacactctttccctacacgacgctcttccgatctcgagggcagccacagcaa

SEQ ID NO: 5464 - DNA, 94 bp, Artificial Sequence
  Description of Artificial Sequence: Synthetic primer
aatgatacggcgaccaccgagatctacaccctatcctacactctttccctacacgacgctcttccgatcttactcacttccgctccgttctctt

SEQ ID NO: 5465 - DNA, 102 bp, Artificial Sequence
  Description of Artificial Sequence: Synthetic polynucleotide
aatgatacggcgaccaccgagatctacaccctatcctacactctttccctacacgacgctcttccgatctcccactttacatataattgacctttctgattc

SEQ ID NO: 5466 - DNA, 93 bp, Artificial Sequence
  Description of Artificial Sequence: Synthetic primer
aatgatacggcgaccaccgagatctacaccctatcctacactctttccctacacgacgctcttccgatctttcgaactttctccctggtcaca

SEQ ID NO: 5467 - DNA, 92 bp, Artificial Sequence
  Description of Artificial Sequence: Synthetic primer
aatgatacggcgaccaccgagatctacaccctatcctacactctttccctacacgacgctcttccgatctgatctcttccctccctccttcc

SEQ ID NO: 5468 - DNA, 91 bp, Artificial Sequence
  Description of Artificial Sequence: Synthetic primer
aatgatacggcgaccaccgagatctacaccctatcctacactctttccctacacgacgctcttccgatctggccaccaacctcattctgtt

SEQ ID NO: 5469 - DNA, 94 bp, Artificial Sequence
  Description of Artificial Sequence: Synthetic primer
aatgatacggcgaccaccgagatctacaccctatcctacactctttccctacacgacgctcttccgatctctgcatttgtcctttgactggtgt

SEQ ID NO: 5470 - DNA, 89 bp, Artificial Sequence
  Description of Artificial Sequence: Synthetic primer
aatgatacggcgaccaccgagatctacaccctatcctacactctttccctacacgacgctcttccgatctgcatggtggaggtgctggc

SEQ ID NO: 5471 - DNA, 90 bp, Artificial Sequence
  Description of Artificial Sequence: Synthetic primer
aatgatacggcgaccaccgagatctacaccctatcctacactctttccctacacgacgctcttccgatctaggagctgtttgcagggtcc

SEQ ID NO: 5472 - DNA, 100 bp, Artificial Sequence
  Description of Artificial Sequence: Synthetic polynucleotide
aatgatacggcgaccaccgagatctacaccctatcctacactctttccctacacgacgctcttccgatcttgctaaaaagtgtaagaagaaatgagctag

SEQ ID NO: 5473 - DNA, 95 bp, Artificial Sequence
  Description of Artificial Sequence: Synthetic primer
aatgatacggcgaccaccgagatctacaccctatcctacactctttccctacacgacgctcttccgatctccttcagaagagggtgcattttcag

SEQ ID NO: 5474 - DNA, 96 bp, Artificial Sequence
  Description of Artificial Sequence: Synthetic primer
aatgatacggcgaccaccgagatctacaccctatcctacactctttccctacacgacgctcttccgatcttgtctatggcacatcaaactatgcac

SEQ ID NO: 5475 - DNA, 99 bp, Artificial Sequence
  Description of Artificial Sequence: Synthetic primer
aatgatacggcgaccaccgagatctacaccctatcctacactctttccctacacgacgctcttccgatctatctgccaccatagagggtatagaaaaac

SEQ ID NO: 5476 - DNA, 99 bp, Artificial Sequence
  Description of Artificial Sequence: Synthetic primer
aatgatacggcgaccaccgagatctacaccctatcctacactctttccctacacgacgctcttccgatctaattgaaacactattgagatccttttccc

SEQ ID NO: 5477 - DNA, 98 bp, Artificial Sequence
  Description of Artificial Sequence: Synthetic primer
aatgatacggcgaccaccgagatctacaccctatcctacactctttccctacacgacgctcttccgatctaaaaaaacagagaggataggacaaaaca

SEQ ID NO: 5478 - DNA, 97 bp, Artificial Sequence
  Description of Artificial Sequence: Synthetic primer
aatgatacggcgaccaccgagatctacaccctatcctacactctttccctacacgacgctcttccgatctggaaaactcaacttgctgactacatct

SEQ ID NO: 5479 - DNA, 96 bp, Artificial Sequence
  Description of Artificial Sequence: Synthetic primer
aatgatacggcgaccaccgagatctacaccctatcctacactctttccctacacgacgctcttccgatctgtaaatccattctgctgctgtcctgg

SEQ ID NO: 5480 - DNA, 103 bp, Artificial Sequence
  Description of Artificial Sequence: Synthetic polynucleotide
aatgatacggcgaccaccgagatctacaccctatcctacactctttccctacacgacgctcttccgatctcaaagccctaccaaaaaaaaaaaaaaaatagcc

SEQ ID NO: 5481 - DNA, 100 bp, Artificial Sequence
  Description of Artificial Sequence: Synthetic polynucleotide
aatgatacggcgaccaccgagatctacaccctatcctacactctttccctacacgacgctcttccgatcttttgtgcgtttcaatcaccactaaatcaat

SEQ ID NO: 5482 - DNA, 103 bp, Artificial Sequence
  Description of Artificial Sequence: Synthetic polynucleotide
aatgatacggcgaccaccgagatctacaccctatcctacactctttccctacacgacgctcttccgatcttaaccttgaataaaagacaatgtactatgctca

SEQ ID NO: 5483 - DNA, 101 bp, Artificial Sequence
  Description of Artificial Sequence: Synthetic polynucleotide
aatgatacggcgaccaccgagatctacaccctatcctacactctttccctacacgacgctcttccgatcttgtgcaaccttaggaagaaaaaagaaattac

SEQ ID NO: 5484 - DNA, 104 bp, Artificial Sequence
  Description of Artificial Sequence: Synthetic polynucleotide
aatgatacggcgaccaccgagatctacaccctatcctacactctttccctacacgacgctcttccgatctccagatttcaattcttttgacaacaaatagagct

SEQ ID NO: 5485 - DNA, 100 bp, Artificial Sequence
  Description of Artificial Sequence: Synthetic polynucleotide
aatgatacggcgaccaccgagatctacaccctatcctacactctttccctacacgacgctcttccgatctactgctcaaagaaactaatcaactgagtaa

SEQ ID NO: 5486 - DNA, 95 bp, Artificial Sequence
  Description of Artificial Sequence: Synthetic primer
aatgatacggcgaccaccgagatctacaccctatcctacactctttccctacacgacgctcttccgatctttgtagtccaccatcctgataaggt

SEQ ID NO: 5487 - DNA, 90 bp, Artificial Sequence
  Description of Artificial Sequence: Synthetic primer
aatgatacggcgaccaccgagatctacaccctatcctacactctttccctacacgacgctcttccgatctcccgatgaatggagacgcgc

SEQ ID NO: 5488 - DNA, 97 bp, Artificial Sequence
  Description of Artificial Sequence: Synthetic primer
aatgatacggcgaccaccgagatctacaccctatcctacactctttccctacacgacgctcttccgatctaacaggtttacaaaccctcgtgaagac

SEQ ID NO: 5489 - DNA, 97 bp, Artificial Sequence
  Description of Artificial Sequence: Synthetic primer
aatgatacggcgaccaccgagatctacaccctatcctacactctttccctacacgacgctcttccgatctcaaccagttcttgagtctcagaaaaga

SEQ ID NO: 5490 - DNA, 94 bp, Artificial Sequence
  Description of Artificial Sequence: Synthetic primer
aatgatacggcgaccaccgagatctacaccctatcctacactctttccctacacgacgctcttccgatctgagaactaaggcggaatcagcacg

SEQ ID NO: 5491 - DNA, 89 bp, Artificial Sequence
  Description of Artificial Sequence: Synthetic primer
aatgatacggcgaccaccgagatctacaccctatcctacactctttccctacacgacgctcttccgatctagcccgactgccttgtacc

SEQ ID NO: 5492 - DNA, 90 bp, Artificial Sequence
  Description of Artificial Sequence: Synthetic primer
aatgatacggcgaccaccgagatctacaccctatcctacactctttccctacacgacgctcttccgatctgggccaggaaggctccagtg

SEQ ID NO: 5493 - DNA, 94 bp, Artificial Sequence
  Description of Artificial Sequence: Synthetic primer
aatgatacggcgaccaccgagatctacaccctatcctacactctttccctacacgacgctcttccgatctggagatgagggagggagagactca

SEQ ID NO: 5494 - DNA, 90 bp, Artificial Sequence
  Description of Artificial Sequence: Synthetic primer
aatgatacggcgaccaccgagatctacaccctatcctacactctttccctacacgacgctcttccgatctcctggaaagccaggtgcctg

SEQ ID NO: 5495 - DNA, 88 bp, Artificial Sequence
  Description of Artificial Sequence: Synthetic primer
aatgatacggcgaccaccgagatctacaccctatcctacactctttccctacacgacgctcttccgatctagccgtgtgctgatgggc

SEQ ID NO: 5496 - DNA, 90 bp, Artificial Sequence
  Description of Artificial Sequence: Synthetic primer
aatgatacggcgaccaccgagatctacaccctatcctacactctttccctacacgacgctcttccgatctcaggcacacgttgtagcgca

SEQ ID NO: 5497 - DNA, 92 bp, Artificial Sequence
  Description of Artificial Sequence: Synthetic primer
aatgatacggcgaccaccgagatctacaccctatcctacactctttccctacacgacgctcttccgatctctttgctcacccaccagctcag

SEQ ID NO: 5498 - DNA, 90 bp, Artificial Sequence
  Description of Artificial Sequence: Synthetic primer
aatgatacggcgaccaccgagatctacaccctatcctacactctttccctacacgacgctcttccgatctctgcccaacccagagagcct

SEQ ID NO: 5499 - DNA, 90 bp, Artificial Sequence
  Description of Artificial Sequence: Synthetic primer
aatgatacggcgaccaccgagatctacaccctatcctacactctttccctacacgacgctcttccgatctgaccagggtgaagagcgtgc

SEQ ID NO: 5500 - DNA, 93 bp, Artificial Sequence
  Description of Artificial Sequence: Synthetic primer
aatgatacggcgaccaccgagatctacaccctatcctacactctttccctacacgacgctcttccgatctacacttcagccttcctccctgta

SEQ ID NO: 5501 - DNA, 91 bp, Artificial Sequence
  Description of Artificial Sequence: Synthetic primer
aatgatacggcgaccaccgagatctacaccctatcctacactctttccctacacgacgctcttccgatctagagaggctggtaggtggtgc

SEQ ID NO: 5502 - DNA, 95 bp, Artificial Sequence
  Description of Artificial Sequence: Synthetic primer
aatgatacggcgaccaccgagatctacaccctatcctacactctttccctacacgacgctcttccgatctgcaagtgcccagtatattttgttgc

SEQ ID NO: 5503 - DNA, 90 bp, Artificial Sequence
  Description of Artificial Sequence: Synthetic primer
aatgatacggcgaccaccgagatctacaccctatcctacactctttccctacacgacgctcttccgatctccaggacctcagaccgaagt

SEQ ID NO: 5504 - DNA, 90 bp, Artificial Sequence
  Description of Artificial Sequence: Synthetic primer
aatgatacggcgaccaccgagatctacaccctatcctacactctttccctacacgacgctcttccgatctttatggccttggctccagct

SEQ ID NO: 5505 - DNA, 90 bp, Artificial Sequence
  Description of Artificial Sequence: Synthetic primer
aatgatacggcgaccaccgagatctacaccctatcctacactctttccctacacgacgctcttccgatctcccaaggctgagggtgaggc

SEQ ID NO: 5506 - DNA, 89 bp, Artificial Sequence
  Description of Artificial Sequence: Synthetic primer
aatgatacggcgaccaccgagatctacaccctatcctacactctttccctacacgacgctcttccgatctaggcggctccggtagagga

SEQ ID NO: 5507 - DNA, 92 bp, Artificial Sequence
  Description of Artificial Sequence: Synthetic primer
aatgatacggcgaccaccgagatctacaccctatcctacactctttccctacacgacgctcttccgatctcccactcttcagatcctctggg

SEQ ID NO: 5508 - DNA, 89 bp, Artificial Sequence
  Description of Artificial Sequence: Synthetic primer
aatgatacggcgaccaccgagatctacaccctatcctacactctttccctacacgacgctcttccgatctgtcccaggtcctgctctgc

SEQ ID NO: 5509 - DNA, 88 bp, Artificial Sequence
  Description of Artificial Sequence: Synthetic primer
aatgatacggcgaccaccgagatctacaccctatcctacactctttccctacacgacgctcttccgatctggctggcatccttgggct

SEQ ID NO: 5510 - DNA, 89 bp, Artificial Sequence
  Description of Artificial Sequence: Synthetic primer
aatgatacggcgaccaccgagatctacaccctatcctacactctttccctacacgacgctcttccgatcttggcgagaggaagggcctg

SEQ ID NO: 5511 - DNA, 90 bp, Artificial Sequence
  Description of Artificial Sequence: Synthetic primer
aatgatacggcgaccaccgagatctacaccctatcctacactctttccctacacgacgctcttccgatctcccgctttgaagtcccacca

SEQ ID NO: 5512 - DNA, 91 bp, Artificial Sequence
  Description of Artificial Sequence: Synthetic primer
aatgatacggcgaccaccgagatctacaccctatcctacactctttccctacacgacgctcttccgatctagacggtactcactcctcagc

SEQ ID NO: 5513 - DNA, 95 bp, Artificial Sequence
  Description of Artificial Sequence: Synthetic primer
aatgatacggcgaccaccgagatctacaccctatcctacactctttccctacacgacgctcttccgatctactcacagaagactcagtatccgtt

SEQ ID NO: 5514 - DNA, 89 bp, Artificial Sequence
  Description of Artificial Sequence: Synthetic primer
aatgatacggcgaccaccgagatctacaccctatcctacactctttccctacacgacgctcttccgatctcagctgaggctttgcccgc

SEQ ID NO: 5515 - DNA, 90 bp, Artificial Sequence
  Description of Artificial Sequence: Synthetic primer
aatgatacggcgaccaccgagatctacaccctatcctacactctttccctacacgacgctcttccgatctgtggatgcctctcccgaggg

SEQ ID NO: 5516 - DNA, 89 bp, Artificial Sequence
  Description of Artificial Sequence: Synthetic primer
aatgatacggcgaccaccgagatctacaccctatcctacactctttccctacacgacgctcttccgatctctcatgctccctgccctgt

SEQ ID NO: 5517 - DNA, 90 bp, Artificial Sequence
  Description of Artificial Sequence: Synthetic primer
aatgatacggcgaccaccgagatctacaccctatcctacactctttccctacacgacgctcttccgatcttgggtctgggtgcttgagga

SEQ ID NO: 5518 - DNA, 90 bp, Artificial Sequence
  Description of Artificial Sequence: Synthetic primer
aatgatacggcgaccaccgagatctacaccctatcctacactctttccctacacgacgctcttccgatctttcaatgagccgagccagcc

SEQ ID NO: 5519 - DNA, 92 bp, Artificial Sequence
  Description of Artificial Sequence: Synthetic primer
aatgatacggcgaccaccgagatctacaccctatcctacactctttccctacacgacgctcttccgatctgaccacagacaggccatgagga

SEQ ID NO: 5520 - DNA, 92 bp, Artificial Sequence
  Description of Artificial Sequence: Synthetic primer
aatgatacggcgaccaccgagatctacaccctatcctacactctttccctacacgacgctcttccgatctccaagcgcgacataccacacag

SEQ ID NO: 5521 - DNA, 96 bp, Artificial Sequence
  Description of Artificial Sequence: Synthetic primer
aatgatacggcgaccaccgagatctacaccctatcctacactctttccctacacgacgctcttccgatctgaccatcgagagagcctaacatcaga

SEQ ID NO: 5522 - DNA, 89 bp, Artificial Sequence
  Description of Artificial Sequence: Synthetic primer
aatgatacggcgaccaccgagatctacaccctatcctacactctttccctacacgacgctcttccgatctagccgagaagccggtctgg

SEQ ID NO: 5523 - DNA, 91 bp, Artificial Sequence
  Description of Artificial Sequence: Synthetic primer
aatgatacggcgaccaccgagatctacaccctatcctacactctttccctacacgacgctcttccgatcttggtagatgacctcggtggag

SEQ ID NO: 5524 - DNA, 90 bp, Artificial Sequence
  Description of Artificial Sequence: Synthetic primer
aatgatacggcgaccaccgagatctacaccctatcctacactctttccctacacgacgctcttccgatctccatcagcaccgtgactggc

SEQ ID NO: 5525 - DNA, 93 bp, Artificial Sequence
  Description of Artificial Sequence: Synthetic primer
aatgatacggcgaccaccgagatctacaccctatcctacactctttccctacacgacgctcttccgatctcggtcccaacaccggaaaggata

SEQ ID NO: 5526 - DNA, 88 bp, Artificial Sequence
  Description of Artificial Sequence: Synthetic primer
aatgatacggcgaccaccgagatctacaccctatcctacactctttccctacacgacgctcttccgatctaaaggagcctgccctgcc

SEQ ID NO: 5527 - DNA, 92 bp, Artificial Sequence
  Description of Artificial Sequence: Synthetic primer
aatgatacggcgaccaccgagatctacaccctatcctacactctttccctacacgacgctcttccgatctcgcccaggtcggagattttgag

SEQ ID NO: 5528 - DNA, 89 bp, Artificial Sequence
  Description of Artificial Sequence: Synthetic primer
aatgatacggcgaccaccgagatctacaccctatcctacactctttccctacacgacgctcttccgatctctcggagtgtgcgtgtggt

SEQ ID NO: 5529 - DNA, 90 bp, Artificial Sequence
  Description of Artificial Sequence: Synthetic primer
aatgatacggcgaccaccgagatctacaccctatcctacactctttccctacacgacgctcttccgatctgggcagagggatgaggctcc

SEQ ID NO: 5530 - DNA, 88 bp, Artificial Sequence
  Description of Artificial Sequence: Synthetic primer
aatgatacggcgaccaccgagatctacaccctatcctacactctttccctacacgacgctcttccgatcttagcgcccgctcaaccag

SEQ ID NO: 5531 - DNA, 88 bp, Artificial Sequence
  Description of Artificial Sequence: Synthetic primer
aatgatacggcgaccaccgagatctacaccctatcctacactctttccctacacgacgctcttccgatcttggccgagtcagcagagc

SEQ ID NO: 5532 - DNA, 89 bp, Artificial Sequence
  Description of Artificial Sequence: Synthetic primer
aatgatacggcgaccaccgagatctacaccctatcctacactctttccctacacgacgctcttccgatctctgtggcatccaggcgttg

SEQ ID NO: 5533 - DNA, 98 bp, Artificial Sequence
  Description of Artificial Sequence: Synthetic primer
aatgatacggcgaccaccgagatctacaccctatcctacactctttccctacacgacgctcttccgatctttggaataccctctactttcttgtgtaa

SEQ ID NO: 5534 - DNA, 95 bp, Artificial Sequence
  Description of Artificial Sequence: Synthetic primer
aatgatacggcgaccaccgagatctacaccctatcctacactctttccctacacgacgctcttccgatcttgggtgagtgatctcacaggacaac

SEQ ID NO: 5535 - DNA, 98 bp, Artificial Sequence
  Description of Artificial Sequence: Synthetic primer
aatgatacggcgaccaccgagatctacaccctatcctacactctttccctacacgacgctcttccgatctacttcccttaaaagtgttgtgttacttt

SEQ ID NO: 5536 - DNA, 101 bp, Artificial Sequence
  Description of Artificial Sequence: Synthetic polynucleotide
aatgatacggcgaccaccgagatctacaccctatcctacactctttccctacacgacgctcttccgatcttgattcatttcaacttggtacatttgtgact

SEQ ID NO: 5537 - DNA, 101 bp, Artificial Sequence
  Description of Artificial Sequence: Synthetic polynucleotide
aatgatacggcgaccaccgagatctacaccctatcctacactctttccctacacgacgctcttccgatctttctacgatttatattctgtacttcctccag

SEQ ID NO: 5538 - DNA, 90 bp, Artificial Sequence
  Description of Artificial Sequence: Synthetic primer
aatgatacggcgaccaccgagatctacaccctatcctacactctttccctacacgacgctcttccgatctttctggtggtgctgtgtgca

SEQ ID NO: 5539 - DNA, 94 bp, Artificial Sequence
  Description of Artificial Sequence: Synthetic primer
aatgatacggcgaccaccgagatctacaccctatcctacactctttccctacacgacgctcttccgatctatgagcctttacaaattgctgcca

SEQ ID NO: 5540 - DNA, 101 bp, Artificial Sequence
  Description of Artificial Sequence: Synthetic polynucleotide
aatgatacggcgaccaccgagatctacaccctatcctacactctttccctacacgacgctcttccgatctgctggaaaaattctgacatatacaaaaggat

SEQ ID NO: 5541 - DNA, 102 bp, Artificial Sequence
  Description of Artificial Sequence: Synthetic polynucleotide
aatgatacggcgaccaccgagatctacaccctatcctacactctttccctacacgacgctcttccgatctacaaatcaaaatgcccaagatttaagaccaaa

SEQ ID NO: 5542 - DNA, 97 bp, Artificial Sequence
  Description of Artificial Sequence: Synthetic primer
aatgatacggcgaccaccgagatctacaccctatcctacactctttccctacacgacgctcttccgatctaaccaaagattgggctttcctatcagt

SEQ ID NO: 5543 - DNA, 99 bp, Artificial Sequence
  Description of Artificial Sequence: Synthetic primer
aatgatacggcgaccaccgagatctacaccctatcctacactctttccctacacgacgctcttccgatctagcgattatacatcaggaagtaaacaaac

SEQ ID NO: 5544 - DNA, 101 bp, Artificial Sequence
  Description of Artificial Sequence: Synthetic polynucleotide
aatgatacggcgaccaccgagatctacaccctatcctacactctttccctacacgacgctcttccgatctgacataggtcattagtaacaagtaagttgtt

SEQ ID NO: 5545 - DNA, 101 bp, Artificial Sequence
  Description of Artificial Sequence: Synthetic polynucleotide
aatgatacggcgaccaccgagatctacaccctatcctacactctttccctacacgacgctcttccgatctctttattagcagtgtgagaacagactcaaca

SEQ ID NO: 5546 - DNA, 97 bp, Artificial Sequence
  Description of Artificial Sequence: Synthetic primer
aatgatacggcgaccaccgagatctacaccctatcctacactctttccctacacgacgctcttccgatctagagactttgtataaaggcagaacgtg

SEQ ID NO: 5547 - DNA, 102 bp, Artificial Sequence
  Description of Artificial Sequence: Synthetic polynucleotide
aatgatacggcgaccaccgagatctacaccctatcctacactctttccctacacgacgctcttccgatctccacacaacacatttatctacaaatgctttac

SEQ ID NO: 5548 - DNA, 98 bp, Artificial Sequence
  Description of Artificial Sequence: Synthetic primer
aatgatacggcgaccaccgagatctacaccctatcctacactctttccctacacgacgctcttccgatctgatatctgaagtgtgtgaagagtttgga

SEQ ID NO: 5549 - DNA, 95 bp, Artificial Sequence
  Description of Artificial Sequence: Synthetic primer
aatgatacggcgaccaccgagatctacaccctatcctacactctttccctacacgacgctcttccgatctgagtgggataaggaggcaatttccc

SEQ ID NO: 5550 - DNA, 95 bp, Artificial Sequence
  Description of Artificial Sequence: Synthetic primer
aatgatacggcgaccaccgagatctacaccctatcctacactctttccctacacgacgctcttccgatctcacgctttgcacactcaatgagaat

SEQ ID NO: 5551 - DNA, 93 bp, Artificial Sequence
  Description of Artificial Sequence: Synthetic primer
aatgatacggcgaccaccgagatctacaccctatcctacactctttccctacacgacgctcttccgatctacaggttggttgtggtcttttca

SEQ ID NO: 5552 - DNA, 92 bp, Artificial Sequence
  Description of Artificial Sequence: Synthetic primer
aatgatacggcgaccaccgagatctacaccctatcctacactctttccctacacgacgctcttccgatcttctctcctccctgcttctgtct

SEQ ID NO: 5553 - DNA, 102 bp, Artificial Sequence
  Description of Artificial Sequence: Synthetic polynucleotide
aatgatacggcgaccaccgagatctacaccctatcctacactctttccctacacgacgctcttccgatctgtaacttgaaccatcttttaactcaggtactg

SEQ ID NO: 5554 - DNA, 92 bp, Artificial Sequence
  Description of Artificial Sequence: Synthetic primer
aatgatacggcgaccaccgagatctacaccctatcctacactctttccctacacgacgctcttccgatctgacaatggctcctggttgtagc

SEQ ID NO: 5555 - DNA, 99 bp, Artificial Sequence
  Description of Artificial Sequence: Synthetic primer
aatgatacggcgaccaccgagatctacaccctatcctacactctttccctacacgacgctcttccgatctcttactgcctcttgcttctcttttcctat

SEQ ID NO: 5556 - DNA, 88 bp, Artificial Sequence
  Description of Artificial Sequence: Synthetic primer
aatgatacggcgaccaccgagatctacaccctatcctacactctttccctacacgacgctcttccgatctaaggcgcactggcctcat

SEQ ID NO: 5557 - DNA, 97 bp, Artificial Sequence
  Description of Artificial Sequence: Synthetic primer
aatgatacggcgaccaccgagatctacaccctatcctacactctttccctacacgacgctcttccgatctattcctcactgattgctcttaggtctg

SEQ ID NO: 5558 - DNA, 93 bp, Artificial Sequence
  Description of Artificial Sequence: Synthetic primer
aatgatacggcgaccaccgagatctacaccctatcctacactctttccctacacgacgctcttccgatctcacttgtgccctgactttcaact

SEQ ID NO: 5559 - DNA, 93 bp, Artificial Sequence
  Description of Artificial Sequence: Synthetic primer
aatgatacggcgaccaccgagatctacaccctatcctacactctttccctacacgacgctcttccgatctctgaagacccaggtccagatgaa

SEQ ID NO: 5560 - DNA, 90 bp, Artificial Sequence
  Description of Artificial Sequence: Synthetic primer
aatgatacggcgaccaccgagatctacaccctatcctacactctttccctacacgacgctcttccgatctcttgcagcagccagactgcc

SEQ ID NO: 5561 - DNA, 91 bp, Artificial Sequence
  Description of Artificial Sequence: Synthetic primer
aatgatacggcgaccaccgagatctacaccctatcctacactctttccctacacgacgctcttccgatctgcgtcaggtgctaggacaact

SEQ ID NO: 5562 - DNA, 97 bp, Artificial Sequence
  Description of Artificial Sequence: Synthetic primer
aatgatacggcgaccaccgagatctacaccctatcctacactctttccctacacgacgctcttccgatctcatgcaagaagaatacagtgggcagag

SEQ ID NO: 5563 - DNA, 104 bp, Artificial Sequence
  Description of Artificial Sequence: Synthetic polynucleotide
aatgatacggcgaccaccgagatctacaccctatcctacactctttccctacacgacgctcttccgatcttcgatccaaagtaatacatctgaaagaatatacg

SEQ ID NO: 5564 - DNA, 96 bp, Artificial Sequence
  Description of Artificial Sequence: Synthetic primer
aatgatacggcgaccaccgagatctacaccctatcctacactctttccctacacgacgctcttccgatctgctcctgtgaaaatagatatgaggcc

SEQ ID NO: 5565 - DNA, 102 bp, Artificial Sequence
  Description of Artificial Sequence: Synthetic polynucleotide
aatgatacggcgaccaccgagatctacaccctatcctacactctttccctacacgacgctcttccgatctattttcaagctcaacaatcctttagaatagct

SEQ ID NO: 5566 - DNA, 102 bp, Artificial Sequence
  Description of Artificial Sequence: Synthetic polynucleotide
aatgatacggcgaccaccgagatctacaccctatcctacactctttccctacacgacgctcttccgatctcatgaccaaagtattcttctgtatcttctttc

SEQ ID NO: 5567 - DNA, 88 bp, Artificial Sequence
  Description of Artificial Sequence: Synthetic primer
aatgatacggcgaccaccgagatctacaccctatcctacactctttccctacacgacgctcttccgatctcgcgcccttgtgcctcat

SEQ ID NO: 5568 - DNA, 99 bp, Artificial Sequence
  Description of Artificial Sequence: Synthetic primer
aatgatacggcgaccaccgagatctacaccctatcctacactctttccctacacgacgctcttccgatctctgttttcaagtttggaaatgactaggga

SEQ ID NO: 5569 - DNA, 92 bp, Artificial Sequence
  Description of Artificial Sequence: Synthetic primer
aatgatacggcgaccaccgagatctacaccctatcctacactctttccctacacgacgctcttccgatctgagaacagcccagaagttggac

SEQ ID NO: 5570 - DNA, 89 bp, Artificial Sequence
  Description of Artificial Sequence: Synthetic primer
aatgatacggcgaccaccgagatctacaccctatcctacactctttccctacacgacgctcttccgatctagcagggcacgaccgctta

SEQ ID NO: 5571 - DNA, 90 bp, Artificial Sequence
  Description of Artificial Sequence: Synthetic primer
aatgatacggcgaccaccgagatctacaccctatcctacactctttccctacacgacgctcttccgatctcctgagaggacagggaaccc

SEQ ID NO: 5572 - DNA, 90 bp, Artificial Sequence
  Description of Artificial Sequence: Synthetic primer
aatgatacggcgaccaccgagatctacaccctatcctacactctttccctacacgacgctcttccgatctcccacttcccaaagatgccc

SEQ ID NO: 5573 - DNA, 98 bp, Artificial Sequence
  Description of Artificial Sequence: Synthetic primer
aatgatacggcgaccaccgagatctacaccctatcctacactctttccctacacgacgctcttccgatctctgataatgaatccgtgactacatcctc

SEQ ID NO: 5574 - DNA, 96 bp, Artificial Sequence
  Description of Artificial Sequence: Synthetic primer
aatgatacggcgaccaccgagatctacaccctatcctacactctttccctacacgacgctcttccgatctaagtgctaaagtcagggccacttact

SEQ ID NO: 5575 - DNA, 92 bp, Artificial Sequence
  Description of Artificial Sequence: Synthetic primer
aatgatacggcgaccaccgagatctacaccctatcctacactctttccctacacgacgctcttccgatctgggaggcagggttacagggaat

SEQ ID NO: 5576 - DNA, 90 bp, Artificial Sequence
  Description of Artificial Sequence: Synthetic primer
aatgatacggcgaccaccgagatctacaccctatcctacactctttccctacacgacgctcttccgatctttgccctctgggaaccaacc

SEQ ID NO: 5577 - DNA, 91 bp, Artificial Sequence
  Description of Artificial Sequence: Synthetic primer
aatgatacggcgaccaccgagatctacaccctatcctacactctttccctacacgacgctcttccgatctgatggtgatggtgtggtggcg

SEQ ID NO: 5578 - DNA, 90 bp, Artificial Sequence
  Description of Artificial Sequence: Synthetic primer
aatgatacggcgaccaccgagatctacaccctatcctacactctttccctacacgacgctcttccgatctgactcttccgggccggactc

SEQ ID NO: 5579 - DNA, 91 bp, Artificial Sequence
  Description of Artificial Sequence: Synthetic primer
aatgatacggcgaccaccgagatctacaccctatcctacactctttccctacacgacgctcttccgatctgtgctatcgtccctgctgggt

SEQ ID NO: 5580 - DNA, 104 bp, Artificial Sequence
  Description of Artificial Sequence: Synthetic polynucleotide
aatgatacggcgaccaccgagatctacaccctatcctacactctttccctacacgacgctcttccgatctttaatttttcaagtggtctatcctgtacttacca

SEQ ID NO: 5581 - DNA, 102 bp, Artificial Sequence
  Description of Artificial Sequence: Synthetic polynucleotide
aatgatacggcgaccaccgagatctacaccctatcctacactctttccctacacgacgctcttccgatctagatgaaacagtgtaagtttcaacagaaatct

SEQ ID NO: 5582 - DNA, 97 bp, Artificial Sequence
  Description of Artificial Sequence: Synthetic primer
aatgatacggcgaccaccgagatctacaccctatcctacactctttccctacacgacgctcttccgatcttgatagttgaacttgtgcctgtctctt

SEQ ID NO: 5583 - DNA, 91 bp, Artificial Sequence
  Description of Artificial Sequence: Synthetic primer
aatgatacggcgaccaccgagatctacaccctatcctacactctttccctacacgacgctcttccgatctgcccacattgttagggccgag

SEQ ID NO: 5584 - DNA, 103 bp, Artificial Sequence
  Description of Artificial Sequence: Synthetic polynucleotide
aatgatacggcgaccaccgagatctacaccctatcctacactctttccctacacgacgctcttccgatctcccttttccagtatcattttcaaatagaatatg

SEQ ID NO: 5585 - DNA, 97 bp, Artificial Sequence
  Description of Artificial Sequence: Synthetic primer
aatgatacggcgaccaccgagatctacaccctatcctacactctttccctacacgacgctcttccgatctcttaaagcctcccttcctcttactctc

SEQ ID NO: 5586 - DNA, 90 bp, Artificial Sequence
  Description of Artificial Sequence: Synthetic primer
aatgatacggcgaccaccgagatctacaccctatcctacactctttccctacacgacgctcttccgatctactgtgagccacactgagcc

SEQ ID NO: 5587 - DNA, 90 bp, Artificial Sequence
  Description of Artificial Sequence: Synthetic primer
aatgatacggcgaccaccgagatctacaccctatcctacactctttccctacacgacgctcttccgatctgggcttgccagatccatgca

SEQ ID NO: 5588 - DNA, 103 bp, Artificial Sequence
  Description of Artificial Sequence: Synthetic polynucleotide
aatgatacggcgaccaccgagatctacaccctatcctacactctttccctacacgacgctcttccgatctcttttgaagaaacagttgtgtattattttgtgg

SEQ ID NO: 5589 - DNA, 91 bp, Artificial Sequence
  Description of Artificial Sequence: Synthetic primer
aatgatacggcgaccaccgagatctacaccctatcctacactctttccctacacgacgctcttccgatctgctgtcttcggttctctctgc

SEQ ID NO: 5590 - DNA, 90 bp, Artificial Sequence
  Description of Artificial Sequence: Synthetic primer
aatgatacggcgaccaccgagatctacaccctatcctacactctttccctacacgacgctcttccgatctttgcgagagcaccgctgaca

SEQ ID NO: 5591 - DNA, 90 bp, Artificial Sequence
  Description of Artificial Sequence: Synthetic primer
aatgatacggcgaccaccgagatctacaccctatcctacactctttccctacacgacgctcttccgatcttgggtccctgcctactcctg

SEQ ID NO: 5592 - DNA, 88 bp, Artificial Sequence
  Description of Artificial Sequence: Synthetic primer
aatgatacggcgaccaccgagatctacaccctatcctacactctttccctacacgacgctcttccgatctgcacgaggagcagtgcct

SEQ ID NO: 5593 - DNA, 90 bp, Artificial Sequence
  Description of Artificial Sequence: Synthetic primer
aatgatacggcgaccaccgagatctacaccctatcctacactctttccctacacgacgctcttccgatcttcgccgcgatcctggacttc

1. A method of monitoring cancer progression in a subject in need thereof, comprising:
(a) determining the presence, absence, and/or amount of each of a subset of genes in a sample derived from a fluid sample in the subject, wherein the subset is determined by (i) performing targeted sequencing on a set of genes on a solid tissue sample from the subject wherein the solid tissue sample is known or suspected of comprising cancerous tissue; (ii) determining a profile of genetic mutations for said set of genes based on the sequencing; and (iii) selecting a subset of 2, 3, or 4 genes of the set of genes based on said profile for said set, wherein said subset is specific to said subject; and
(b) using the results of (a) to monitor progression of the cancer or lack thereof in the subject.

2. (canceled)

3. The method of claim 1, wherein said set of genes comprises at least 10 genes.

4. (canceled)

5. (canceled)

6. The method of claim 1, wherein the set of genes is selected from the group consisting of ABCA1, BRAF, CHD5, EP300, FLT1, ITPA, MYC, PIK3R1, SKP2, TP53, ABCA7, BRCA1, CHEK1, EPHA3, FLT3, JAK1, MYCL1, PIK3R2, SLC19A1, TP73, ABCB1, BRCA2, CHEK2, EPHA5, FLT4, JAK2, MYCN, PKHD1, SLC1A6, TPM3, ABCC2, BRIP1, CLTC, EPHA6, FN1, JAK3, MYH2, PLCB1, SLC22A2, TPMT, ABCC3, BUB1B, COL1A1, EPHA7, FOS, JUN, MYH9, PLCG1, SLCO1B3, TPO, ABCC4, Clorf144, COPS5, EPHA8, FOXO1, KBTBD11, NAV3, PLCG2, SMAD2, TPR, ABCG2, CABLES1, CREB1, EPHB1, FOXO3, KDM6A, NBN, PML, SMAD3, TR10, ABL1, CACNA2D1, CREBBP, EPHB4, FOXP4, KDR, NCOA2, PMS2, SMAD4, TRRAP, ABL2, CAMKV, CRKL, EPHB6, GAB1, KIT, NEK11, PPARG, SMARCA4, TSC1, ACVR1B, CARD11, CRLF2, EPO, GATA1, KLF6, NF1, PPARGC1A, SMARCB1, TSC2, ACVR2A, CARM1, CSF1R, ERBB2, GLI1, KLHDC4, NF2, PPP1R3A, SMO, TTK, ADCY9, CAV1, CSMD3, ERBB3, GLI3, KRAS, NKX2-1, PPP2R1A, SOCS1, TYK2, AGAP2, CBFA2T3, CSNK1G2, ERBB4, GNA11, LMO2, NOS2, PPP2R1B, SOD2, TYMS, AKT1, CBL, CTNNA1, ERCC1, GNAQ, LRP1B, NOS3, PRKAA2, SOS1, UGT1A1, AKT2, CCND1, CTNNA2, ERCC2, GNAS, LRP2, NOTCH1, PRKCA, SOX10, UMPS, AKT3, CCND2, CTNNB1, ERCC3, GPR124, LRP6, NOTCH2, PRKCZ, SOX2, USP9X, ALK, CCND3, CYFIP1, ERCC4, GPR133, LTK, NOTCH3, PRKDC, SP1, VEGF, ANAPC5, CCNE1, CYLD, ERCC5, GRB2, MAN1B1, NPM1, PTCH1, SPRY2, VEGFA, APC, CD40LG, CYP19A1, ERCC6, GSK3B, MAP2K1, NQO1, PTCH2, SRC, VHL, APC2, CD44, CYP1B1, ERG, GSTP1, MAP2K2, NR3Cl, PTEN, ST6GAL2, WRN, AR, CD79A, CYP2C19, ERN2, GUCY1A2, MAP2K4, NRAS, PTGS2, STAT1, WT1, ARAF, CD79B, CYP2C8, ESR1, HDAC1, MAP2K7, NRP2, PTPN11, STAT3, XPA, ARFRP1, CDC42, CYP2D6, ESR2, HDAC2, MAP3K1, NTRK1, PTPRB, STK11, XPC, ARID1A, CDC42BPB, CYP3A4, ETV4, HGF, MAPK1, NTRK2, PTPRD, SUFU, ZFY, ATM, CDC73, CYP3A5, EWSR1, HIF1A, MAPK3, NTRK3, RAD50, SULT1A1, ZNF521, ATP5A1, CDH1, DACH2, EXT1, HM13, MAPK8, OMA1, RAD51, SUZ12, ATR, CDH10, DCC, EZH2, HMGA1, MARK3, OR10R2, RAFT, TAF1, AURKA, CDH2, DCLK3, FANCA, HNF1A, MCL1, PAK3, RARA, TBX22, AURKB, CDH2O, DDB2, FANCD2, HOXA3, MDM2, PARP1, RB1, TCF12, BAI3, CDH5, DDB2, FANCE, HOXA9, MDM4, PAX5, REM1, TCF3, BAP1, CDK2, DGKB, FANCF, HRAS, MECOM, PCDH15, RET, TCF4, BARD1, CDK4, DGKZ, FAS, HSP90AA1, MEN1, PCDH18, RICTOR, TEK, BAX, CDK6, DIRAS3, FBXW7, IDH1, MET, PCNA, RIPK1, TEP1, BCL11A, CDK7, DLG3, FCGR3A, IDH2, MITF, PDGFA, ROR1, TERT, BCL2, CDK8, DLL1, FES, IFNG, MLH1, PDGFB, ROR2, TET2, BCL2A1, CDKN1A, DNMT1, FGFR1, IGF1R, MLL, PDGFRA, ROS1, TGFBR2, BCL2L1, CDKN1B, DNMT3A, FGFR2, IGF2R, MLL3, PDGFRB, RPS6KA2, THBS1, BCL2L2, CDKN2A, DNMT3B, FGFR3, IKBKE, MPL, PDZRN3, RPTOR, TNFAIP3, BCL3, CDKN2B, DOT1L, FGFR4, IKZF1, MRE11A, PHLPP2, RSPO2, TNKS, BCL6, CDKN2C, DPYD, FH, IL2RG, MSH2, PIK3C3, RSPO3, TNKS2, BCR, CDKN2D, E2F1, FHOD3, INHBA, MSH6, PIK3CA, RUNX1, TNNI3K, BIRC5, CDX2, EED, FIGF, INSR, MTHFR, PIK3CB, SDHB, TNR, BIRC6, CEBPA, EGF, FLG2, IRS1, MTOR, PIK3CD, SF3B1, TOP1, BLM, CERK, EGFR, FLNC, IRS2, MUTYH, PIK3CG, SHC1, and TOP2A.

7. The method of claim 1, wherein the fluid sample is selected from the group consisting of blood, serum, plasma, urine, sweat, tears, saliva, or sputum.

8. The method of claim 1, wherein (a) and (b) are performed at a plurality of time points to monitor the status of the cancer over time.

9. (canceled)

10. The method of claim 1, further comprising generating a report communicating the profile of genetic mutations for the set of genes and communicating said report to a caregiver.

11. (canceled)

12. (canceled)

13. The method of claim 10, wherein the report comprises copy number alterations of said set of genes.

14. (canceled)

15. (canceled)

16. The method of claim 1, wherein said determining comprises diluting said nucleic acid molecules from said sample into discrete reaction volumes, wherein said discrete reaction volumes contain between 1 to 10 molecules of said nucleic acid molecule from said sample.

17. The method of claim 16, wherein said discrete reaction volumes are droplets in an emulsion.

18. (canceled)

19. (canceled)

20. The method of claim 1, wherein the targeted sequencing comprises preparing a DNA library from said solid tissue sample, wherein said preparing does not require exponential PCR amplification prior to sequencing of said library.

21. (canceled)

22. (canceled)

23. The method of claim 1, wherein the step of targeted sequencing comprises:
(a) contacting a single-stranded DNA fragment from said solid tissue sample with a target-specific oligonucleotide comprising (i) a region specific for a region of a cancer-related gene and (ii) an adaptor sequence specific for coupling to a sequencing platform;
(b) performing a hybridization reaction to join said target specific oligonucleotides to a single-stranded DNA fragment containing a region of complementarity to said target-specific oligonucleotide;
(c) performing an extension reaction to create an extension product comprising said region and comprising said adaptor; and
(d) sequencing said extension product.

24. (canceled)

25. The method of claim 23, wherein said contacting occurs with the target-specific oligonucleotide free in a solution.

26. (canceled)

27. (canceled)

28. (canceled)

29. (canceled)

30. (canceled)

31. (canceled)

32. (canceled)

33. (canceled)

34. (canceled)

35. (canceled)

36. (canceled)

37. (canceled)

38. (canceled)

39. (canceled)

40. (canceled)

41. (canceled)

42. (canceled)

43. (canceled)

44. (canceled)

45. (canceled)

46. (canceled)

47. (canceled)

48. A method of detecting a mutation in a target polynucleotide region, comprising:
(a) selectively hybridizing an oligonucleotide primer to said target polynucleotide region, wherein said oligonucleotide primer comprises (i) a probe-binding region, and (ii) a template binding region that is at least 70% complementary to a template nucleic acid suspected of harboring a mutation, wherein a portion of said template binding region at least partially overlays a locus of said suspected mutation, and wherein said oligonucleotide primer upon hybridization to said template nucleic acid is extendable by a polymerase if said mutation is present but is not extendable by said polymerase if said mutation is not present;
(b) extending said hybridized oligonucleotide primer to form an extension product; and
(c) detecting said extension product, whereby wherein said detecting indicates the presence of said mutation.

49. The method of claim 48, wherein said extending comprises extending with a DNA polymerase that does not comprise 3′ to 5′ exonuclease activity.

50. The method of claim 48, wherein said detecting comprises selectively hybridizing a reporter probe to said probe binding region.

51. The method of claim 50, wherein said reporter probe comprises a detectable moiety and a quencher moiety, wherein said quencher moiety suppresses detection of said detectable moiety when said reporter probe is intact.

52. (canceled)

53. The method of claim 50, further comprising amplifying said extension product with a reverse primer that is capable of hybridizing to a region of said extension product downstream of said locus.

54. The method of claim 53, wherein said amplifying comprises amplifying with a DNA polymerase that comprises 5′ to 3′ exonuclease activity.

55. (canceled)

56. (canceled)

57. (canceled)

58. (canceled)

59. (canceled)

60. The method of claim 48, wherein said mutation is a single nucleotide polymorphism (SNP).

61. The method of claim 60, wherein said template binding region comprises a 3′ terminal region having a base that overlays said SNP locus.

62. (canceled)

63. (canceled)

64. The method of claim 48, wherein said probe-binding region does not hybridize to said target polynucleotide region.

65. The method of claim 48, further comprising subdividing said nucleic acid sample into a plurality of discrete reaction volumes and detecting a presence or absence of said detectable moiety in each of said reaction volumes.

66. The method of claim 65, further comprising counting a number of said reaction volumes wherein said detectable moiety is detected.

67. (canceled)

68. (canceled)

69. (canceled)

70. A method, comprising:
(a) hybridizing a target-selective oligonucleotide (TSO) to a single-stranded DNA (ssDNA) fragment of an ssDNA library to create a hybridization product, wherein the TSO comprises (i) a region sequence that selectively is complementary to a single target genomic region and (ii) a second single-stranded adaptor sequence located at a first end of the TSO, wherein the ssDNA fragment comprises a second adaptor sequence attached to said ssDNA fragment via single-stranded ligation and further wherein said second adaptor sequence is different than said first adaptor sequence; and
(b) amplifying the hybridization product to create a double stranded extension product.

71. The method of claim 1, wherein the fluid sample is a cell free or substantially cell free genomic sample.

72. The method of claim 1, wherein the monitoring of the cancer progression is used to monitor the efficacy of a cancer treatment.

73. The method of claim 1, wherein the profile of genetic mutations comprises copy number variations.

74. The method of claim 1, wherein the one or more genes comprises TP53.

75. The method of claim 74, wherein the cancer is breast cancer.

76. A method for assessing status of cancer in a subject, comprising:
(a) obtaining a cell free plasma sample from said subject;
(b) extracting targeted polynucleotides from said sample;
(c) analyzing by digital sequencing said targeted polynucleotides to obtain a genetic profile for a set of genes; and,
(d) using said genetic profile to assess the status of the cancer in said subject.

77. The method of claim 76, wherein the set of genes is determined by (i) performing targeted sequencing on a plurality of genes using a tissue sample from the subject wherein the tissue sample is known or suspected of comprising cancerous tissue; (ii) detecting genetic mutations for the plurality of genes based on the sequencing; and (iii) correlating the genetic mutations to identify the set of genes associated with the cancer in said subject.

78. The method of claim 51, wherein a hybridization product of said oligonucleotide primer and reporter probe has a Tm that is at least 10 degrees higher than a Tm of a hybridization product between said oligonucleotide primer and target polynucleotide.
